(19) United States
(12) Patent Application Publication
(10) Pub. No.: US 2006/0024684 A1
(43) Pub. Date: Feb. 2, 2006

(54) Prognostic markers for prediction of treatment response and/or survival of breast cell proliferative disorder patients

(75) Inventors: John Foekens, Rotterdam (NL); Nadia Harbeck, Otterfing (DE); Thomas Koenig, Berlin (DE); Sabine Maier, Berlin (DE); John Martens, Rotterdam (NL); Fabian Model, Berlin (DE); Inko Nimmrich, Berlin (DE); Tamas Rujan, Berlin (DE); Manfred Schmitt, Munich (DE); Ralf Lesche, Berlin (DE); Dimo Dietrich, Berlin (DE); Volkmar Mueller, Hamburg (DE); Antje Kluth, Berlin (DE); Ina Schwope, Berlin (DE); Oliver Hartmann, Berlin (DE); Peter Adorjan, Berlin (DE)

Correspondence Address: DAVIS WRIGHT TREMAINE, LLP, 2600 CENTURY SQUARE, 1501 FOURTH AVENUE, SEATTLE, WA, 98101-1688, US

(73) Assignee: Epigenomics AG

(21) Appl. No.: 11/011,332

(22) Filed: Dec. 13, 2004

Related U.S. Application Data
(63) Continuation-in-part of application No. 10/517,741.

(30) Foreign Application Priority Data
Oct. 1, 2002 (DE) 10245779.4
Jan. 7, 2003 (DE) 10300096.8
Apr. 17, 2003 (DE) 10317955.0
Dec. 13, 2004 (WO) PCT/EP04/14170
Dec. 11, 2003 (EP) 03090432.0
Feb. 10, 2004 (EP) 04090041.7
Sep. 30, 2004 (EP) 04090380.9
Apr. 1, 2004 (EP) 04090127.4
Nov. 16, 2004 (EP) 04027213.0
Jun. 5, 2004 (EP) 04013328.2

(51) Int. Cl. C12Q 1/68

(52) U.S. Cl. 435/6

(57) ABSTRACT

Aspects of the present invention provide compositions and methods for prognosis of, and/or predicting the estrogen treatment outcome of breast cell proliferative disorder patients, and in particular of patients with breast carcinoma. In preferred embodiments, this is achieved, at least in part, by determining the expression level of PITX2, and/or the genetic or the epigenetic modifications of the genomic DNA associated with the gene PITX2. Additional aspects of the invention provide novel sequences, oligomers (e.g., oligonucleotides or peptide nucleic acid (PNA)-oligomers), and antibodies, which have substantial utility in the described inventive methods and compositions.

### CROSS-REFERENCE TO RELATED APPLICATIONS

[0001] This application is a continuation-in-part of U.S. application Ser. No. ______, filed on 11 Dec. 2004 and entitled METHOD AND NUCLEIC ACIDS FOR THE IMPROVED TREATMENT OF BREAST PROLIFERATIE DISORDERS, and additionally claims the additional benefit of priority to: PCT/EP03/010881 of same title, international filing date 1 Oct. 2003; DE 10245779.4, filed 1 Oct. 2002; DE 10300096.8, filed 7 Jan. 2003; DE 10317955.0, filed 17 Apr. 2003; PCT/______, international filing date 13 Dec. 2004, of same title; EP 03 090 432.0, filed 11 Dec. 2003; EP 04 090 041.7, filed 10 Feb. 2004; EP 04 090 380.9, filed 30 Sep. 2004; EP 04 090 127.4, filed 1 Apr. 2004; EP 04 027 213.0, filed 16 Nov. 2004; and EP 04 013 328.2, filed 5 Jun. 2004; all of which are incorporated by reference herein in their entireties.

### FIELD OF THE INVENTION

[0002] The present invention relates generally to methods having utility for predicting the survival and/or treatment response of a patient diagnosed with a cell proliferative disorder of the breast tissues, and in particular aspects, to determining PITX2 gene expression level and/or determining the genetic and/or the epigenetic modifications of the genomic DNA associated with the gene PITX2 and/or the regulatory or promoter regions thereof. Additional aspects relate to novel nucleic acids, oligonucleotides, antibodies, and compositions thereof, having utility in the described methods.

### SEQUENCE LISTING

[0003] A Sequence Listing, pursuant to 37 C.F.R. § 1.52(e)(5), has been provided on compact disc (1 of 1) as a 0.735 MB text file, entitled “47675-99 Sequence Listing.txt,” and which is incorporated by reference herein in its entirety.

### BACKGROUND

[0004] BREAST CANCER. Breast cancer is the most frequently diagnosed cancer and the second leading cause of cancer death in European and American women. In women aged 40-55, breast cancer is the leading cause of death (Greenlee et al., 2000). In 2002 there were 204,000 new cases of breast cancer in the US, and a comparable number in Europe.

[0005] Breast cancer is defined as the uncontrolled proliferation of cells within breast tissues. Breasts are comprised of 15 to 20 lobes joined together by ducts. Cancer arises most commonly in the duct, but is also found in the lobes, with the rarest type of cancer termed inflammatory breast cancer. It will be appreciated by those skilled in the art that there exists a continuing need to improve methods of early detection, classification and treatment of breast cancers. In contrast to the detection of some other common cancers such as cervical and dermal there are inherent difficulties in classifying and detecting breast cancers.

[0006] BREAST CANCER TREATMENT. The first step of any treatment is the assessment of the patient's condition comparative to defined classifications of the disease. However the value of such a system is inherently dependent upon the quality of the classification. Breast cancers are staged according to their size, location and occurrence of metastasis. Methods of treatment include the use of surgery, as well as radiation therapy, chemotherapy and endocrine therapy, which are also used as adjuvant therapies to surgery. Generally, more aggressive diseases are regarded as requiring treatment with more aggressive therapies.

[0007] Although the vast majority of early cancers are operable, (i.e., the tumor can be completely removed by surgery), about one third of the patients with lymph-node negative diseases and about 50-60% of patients with node-positive disease will develop metastases during follow-up.

[0008] Based on this observation, systemic adjuvant treatment has been introduced for both node-positive and node-negative breast cancers. Systemic adjuvant therapy is administered after surgical removal of the tumor, and has been shown to reduce the risk of recurrence significantly. Several types of adjuvant treatment are available: endocrine treatment, also called hormone treatment (for hormone receptor positive tumors); different chemotherapy regimens; and antibody treatments, based on novel agents like Herceptin (an antibody to an epidermal growth factor receptor).

[0009] The growth of the majority (app. 70-80%) of breast cancers is dependent on the presence of estrogen. Therefore, one important target for adjuvant therapy is the removal of estrogen (e.g, by ovarian ablation), the blocking of its synthesis or the blocking of its actions on the tumor cells, either by blocking the receptor with competing substances (e.g., Tamoxifen) or by inhibiting the conversion of androgen into estrogen (e.g., aromatase inhibitors). This type of treatment is referred to in the art as “endocrine treatment.” Endocrine treatment is thought to be efficient only in tumors that express hormone receptors (the estrogen receptor (ER), and/or the progesterone receptor (PR)). Currently, the vast majority of women with hormone receptor positive breast cancer receive some form of endocrine treatment, independent of their nodal status. The most frequently used drug in this scenario is Tamoxifen.

[0010] However, even in hormone receptor positive patients, not all patients benefit from endocrine treatment. Adjuvant endocrine therapy reduces mortality rates by 22% while response rates to endocrine treatment in the metastatic (advanced) setting are 50 to 60%.

[0011] Because Tamoxifen has relatively few side effects, treatment may be justified even for patients with low likelihood of benefit. However, these patients may require additional, more aggressive adjuvant treatment. Even in earliest and least aggressive tumors, such as node-negative, hormone receptor positive tumors, about 21% of patients relapse within 10 years after initial diagnosis if they receive Tamoxifen monotherapy as the only adjuvant treatment (Lancet. 351:1451-67, 1998; Tamoxifen for early breast cancer: an overview of the randomized trials; Early Breast Cancer Trialists' Collaborative Group). Similarly, some patients with hormone receptor negative disease may be treated sufficiently with surgery and potentially radiotherapy alone, whereas others may require additional chemotherapy.

[0012] Several cytotoxic regimens have shown to be effective in reducing the risk of relapse in breast cancer (Mansour et al., 1998). According to current treatment guidelines, most node-positive patients receive adjuvant chemotherapy both in the US and Europe, because the risk of relapse is considerable. Nevertheless, not all patients do relapse, and there is a proportion of patients who would never have relapsed even without chemotherapy, but who nevertheless receive chemotherapy due to the currently used criteria. In hormone receptor positive patients, chemotherapy is usually given before endocrine treatment, whereas hormone receptor negative patients receive only chemotherapy.

[0013] The situation for node-negative patients is particularly complex. In the US, cytotoxic chemotherapy is recommended for node-negative patients, if the tumor is larger than 1 cm. In Europe, chemotherapy is considered for the node-negative cases if one or more risk factors is present, such as: tumor size larger than 2 cm; negative hormone receptor status; tumor grading of three; or age <35. Generally, there is a tendency to select premenopausal women for additional chemotherapy whereas for postmenopausal women, chemotherapy is often omitted. Compared to endocrine treatment, in particular that with Tamoxifen or aromatase inhibitors, chemotherapy is highly toxic, with short-term side effects such as nausea, vomiting, bone marrow depression, as well as long-term effect, such as cardiotoxicity and an increased risk for secondary cancers.

[0014] LONGFELT NEED IN THE ART. It is currently not clear which breast cancer patients should be selected for more aggressive therapy and which would do well without additional aggressive treatment, and thus clinicians agree that there is a substantial and unmet need for proper patient selection methods. The difficulty of selecting the right patients for adjuvant treatment, and of selecting the right adjuvant treatment, and the lack of suitable criteria is also reflected by a recent study and data, which showed that chemotherapy is used much less frequently than recommended (New Mexico Tumor registry; Du et al., 2003). This study provided substantial evidence that there is a need for better selection of patients for chemotherapy or other, more aggressive forms of breast cancer therapy.

[0015] THE PITX2 GENE. PITX2 (a.k.a. PTX2, RS, RGS, ARPI, Brx1, IDG2, IGDS, IHG2, RIEG, IGDS2, IRID2, Otlx2, RIEG1, MGC20144) is known to belong to the PTX subfamily of PTX1, PTX2, and PTX3 genes which define a novel family of transcription factors, within the paired-like class of homeodomain factors. The gene PITX2 (accession number NM_{—}153426) encodes the paired-like homeodomain transcription factor 2, which is known to be expressed during development of anterior structures such as the eye, teeth, and anterior pituitary.

[0016] Toyota et al., (Blood 97:2823-9, 2001) found hypermethylation of the PITX2 gene in a large proportion of acute myeloid leukemia. Furthermore, in this study hypermethylation of PITX2 is positively correlated to methylation of the ER gene and to a reduced expression level. Means to analyze the methylation pattern of the PITX2 gene have been described in a number of patent applications: WO 02/077272 relates to the use of methylation markers to differentiate between AML and ALL; WO 01/19845 relates to several differentially methylated sequences useful for diagnosis of several cell proliferative disorders; WO 02/00927 and WO 01/092565 relate to the use of methylation markers to diagnose diseases associated with development genes or associated with DNA transcription, respectively.

[0017] Loss of heterozygosity (hereinafter also referred to as “LOH”) of chromosome 4 is a known characteristic of many tumor types, and Shivapurkar et al. (Cancer Research 59, 3576-3580, 1999) have observed loss of heterozygosity at multiple regions of chromosome 4 in breast cancer samples and cell lines. Deletions at 4q25-26 were present in 67% of analyzed samples. However, the analyzed region (between markers D4S1586 and D4S175) does not map to the PITX2 gene, and no inference concerning PITX2 expression was made. Furthermore, the investigation as carried out does not indicate the suitability of any genes or loci of the region for a prognostic use.

[0018] Although the methylation of PITX2 has been associated with development, transcription and disease such as cancer, it has not heretofore been recognized as, or suggested as having a role in the outcome prediction of breast cancer patients, or for predicting responsiveness to endocrine treatment.

[0019] PRIOR ART EXPRESSSION ANALYSIS. The expression of a gene, or rather the protein encoded by the gene, can be studied on four different levels: firstly, protein expression levels can be determined directly; secondly, mRNA transcription levels can be determined; thirdly, epigenetic modifications, such as gene's DNA methylation profile or the gene's histone profile; can be analyzed, as methylation is often correlated with inhibited protein expression; and fourth, the gene itself may be analyzed for genetic modifications such as mutations, deletions, polymorphisms etc., which influence the expression of the gene product.

[0020] The levels of observation that have been studied by the methodological developments of recent years in molecular biology, are the genes themselves, the transcription of these genes into RNA, and the translation into the resulting proteins. However, how the activation and inhibition of specific genes, in specific cells and tissues, at specific time points in the course of development of an individual are controlled, is correlatable to the degree and character of the methylation of the genes or respectively the genome. In this respect, pathogenic conditions may manifest themselves in a changed methylation pattern of individual genes or of the genome.

[0021] Four terms generally apply to the fields of overall genome-wide analysis of all these biological processes: namely, Proteomics, Transcriptomics, Epigenomics (or Methylomics) and Genomics. Methods and techniques that can be used for studying expression or studying the modifications responsible for expression on all of these levels are well described in the literature and therefore known to a person skilled in the art. They are described in text books of molecular biology and in a large number of scientific journals.

[0022] Methods for analysis of protein expression of a single gene are known; typically requiring an antibody specific for the gene product of interest. Appropriate technologies are, for example, ELISA or Immunohistochemistry.

[0023] The analysis of mRNA levels has also has been adequately described, with the present ‘gold-standard’ being the use of reverse transcriptase PCR.

[0024] A more detailed description of the prior art relating to existing and well known technologies is given within the description of the present invention.

[0025] U.S. patent application 2003/0198970 by Gareth Roberts lists some of the technologies and methods relating to determine a person's “genetic make up” (i.e., the genetic modifications, such as deletions, polymorphisms, mutations etc., that may vary between and among individuals), and describes the potential role of this genetic sequence information in the individual's variability in disease, response to therapy and prognosis. Epigenetic differences however, are not mentioned. The gene PITX2 is listed within this application as one, out of a long list of about 2,500 other gene names, suggesting its expression could play a role in some kind of treatment response. However, this is merely an assumption, based on sheer speculation, becauses no experiments are disclosed, which demonstrate any kind of relation between genetic modifications of PITX2 and an individual's variation in treatment response.

[0026] PRIOR ART IN METHYLATION ANALYSIS. A less established area in this context is the field of epigenomics or epigenetics (i.e., the field concerned with analysis of DNA methylation patterns. 5-methylcytosine is the most frequent covalent base modification in the DNA of eukaryotic cells. Methylation of DNA can play an important role in the control of gene expression in mammalian cells. It plays a role, for example, in the regulation of the transcription, in genetic imprinting, and in tumorigenesis. DNA methyltransferases are involved in DNA methylation and catalyze the transfer of a methyl group from S-adenosylmethionine to cytosine residues to form 5-methylcytosine, a modified base that is found mostly at CpG sites in the genome. The presence of methylated CpG islands in the promoter region of genes can suppress their expression. This process may be due to the presence of 5-methylcytosine, which apparently interferes with the binding of transcription factors or other DNA-binding proteins to block transcription. In different types of tumors, aberrant or accidental methylation of CpG islands in the promoter region has been observed for many cancer-related genes, resulting in the silencing of their expression. Such genes include tumor suppressor genes, genes that suppress metastasis and angiogenesis, and genes that repair DNA (Momparler and Bovenzi, J. Cell Physiol. 183:145-54, 2000). Therefore, the identification of 5-methylcytosine as a component of genetic information is of considerable interest. However, 5-methylcytosine positions cannot be identified by sequencing, because 5-methylcytosine has the same base pairing behaviour as cytosine. Moreover, the epigenetic information carried by 5-methylcytosine is completely lost during PCR amplification.

[0027] METHYLATION ANALYSIS TECHNIQUES. Additionally, it has been described that DNA methylation may also play a role in the field of pharmacogenetics. An approach concerning the application of information concerning genetic modifications of the genome to the analysis of individual responses to treatment (e.g., similar to that described by Gareth Roberts in U.S. application 2003/0198970) is the subject of the application WO 02/037398, tailored to the application of information about epigenetic modifications of the genome, and based on DNA methylation analysis, to guide treatment selection and to study an individual's treatment responses.

[0028] Demonstration of the applicability of this idea was given, for example, by Esteller et al. (N Engl J. Med. 343:1350-4, 2000), who demonstrated that methylation of the MGMT promoter in gliomas is a useful predictor of the responsiveness of the tumors to alkylating agents. More recently, Frühwald has summarized a series of studies demonstrating that DNA methylation is associated with the aggressiveness of different cancers (Fruhwald M C. DNA methylation patterns in cancer: novel prognostic indicators? Am J Pharmacogenomics: 245-60, 2003).

[0029] An example of the potential of analysis of epigenetic modifications, such as DNA methylation analysis, to the prediction of treatment response related to breast cancer was presented by Martens et al. at the San Antonio Breast Cancer Symposium, San Antonio, Tex., Dec. 3-6, 2003. Breast cancer patients who were initially treated by surgical removal of tumors were treated for metastases using Tamoxifen. The primary tumor samples were analyzed for aberrant methylation patterns. The patients were then divided into two sub-classes according to their objective tumor response: patients with progressive disease (increasing metastasis size); and patients with complete or partial remission of the relapsed tumor (decreasing metastasis size). The two sub-classes could be distinguished on the basis of their methylation patterns. This indicates that the methylation pattern described in that study can serve as a predictive treatment response tool for an endocrine treatment (e.g., Tamoxifen). The results of this study, are the subject of patent application WO 04/035803, published on Apr. 29, 2004. and entitled “Method and nucleic acid for the improved treatment of breast cell proliferative disorders.” PITX2 is also listed as a predictive marker in said application, however the use of said marker is only described as a treatment response marker and not as a prognostic marker.

[0030] Currently several predictive markers are under evaluation. The only commonly used treatment targeting the endocrine pathways is Tamoxifen, however it is anticipated that the majority of biomarkers associated with Tamoxifen response are relevant to all drugs with the same mechanism of action, or that target the same pathway. For example, Estrogen receptor (hereinafter also referred to as ‘ER’) and Progesterone receptor (hereinafter also referred to as ‘PR’) expression are used to select patients for any treatment targeting the endocrine pathways. Among the markers which have been associated with Tamoxifen response is bcl-2. High bcl-2 expression levels showed promising correlation to Tamoxifen therapy response in patients with metastatic disease and prolonged survival and added valuable information to an ER negative patient subgroup (J Clin Oncology, 15 5:1916-1922, 1997; Endocrine, 13:1-10, 2000). There is conflicting evidence regarding the independent predictive value of c-erbB2 (Her2/neu) overexpression in patients with advanced breast cancer that require further evaluation and verification (British J of Cancer, 79:1220-1226, 1999; J Natl Cancer Inst, 90:1601-1608, 1998).

[0031] Other predictive markers include SRC-1 (steroid receptor coactivator-1), CGA mRNA over expression, cell kinetics and S phase fraction assays (Breast Cancer Res and Treat, 48:87-92, 1998; Oncogene, 20:6955-6959, 2001). Recently, uPA (Urokinase-type plasminogen activator) and PAI-1 (Plasminogen activator inhibitor type 1) together showed to be useful to define a subgroup of patients who have worse prognosis and who would benefit from adjuvant systemic therapy (J Clinical Oncology, 20 No. 4, 2002). However, all of these markers need further evaluations in prospective trials as none of them is yet a validated marker of response.

[0032] Additionally, study results presented by Paik et al. at the San Antonio Breast Cancer Symposium, San Antonio, Tex., Dec. 3-6, 2003, address this question, by analyzing the mRNA expression pattern of 16 genes plus 5 controls with RT-PCR. However it is unlikely that said markers will be suitable for use in a commercial test, due to the high number of genes. It is particularly preferred that for a commercially available test a more limited number of genes are analyzed.

[0033] A recent study relates to the prognostic power of methylation analysis in breast cancer patients (Müller et al. Cancer Res. 63:7641-5, 2003). Müller et al describe a set of genes that can be used as prognostic biomarkers in breast cancer patients by analysis of pre-therapeutic sera. Specific aberrant methylation patterns of two genes found in DNA from pre-treatment serum of cancer patients indicated whether their prognosis was good or bad. The DNA analyzed was not tissue derived DNA but serum DNA. Most likely, the presence of a tumor-specific pattern indicates that tumor derived DNA is present, however, the absence of a specific methylation pattern may be due to a tumor which does not show this methylation pattern, or a tumor which does not shed sufficient DNA into the blood stream. Good or bad prognosis was defined as long or short “overall survival” after surgery without adjuvant treatment. This result therefore relates to patients who do not receive a post-surgical treatment. The markers are therefore (unless proven otherwise) considered to be purely prognostic. The markers provide no information concerning treatment response and can provide only a very basic guide as to the aggressiveness of the tumor. On this basis clinicians can only speculate on the suitability of treatment options. As it is however standard to provide Tamoxifen (or other endocrine therapies) as an adjuvant treatment to the majority of patients irrespectively of the aggressiveness of the tumor, these markers are not applicable to most patients.

[0034] Therefore there is still a substantial and long-felt need in the art for the improved treatment of breast cancer patients that is not present in the current art. Specifically, none of the prior art markers is able to answer/address the specific problem as outlined above; namely, whether a patient treated by means of a primary treatment (e.g., surgery) is a suitable candidate for treatment using only an endocrine treatment (e.g., but not limited to Tamoxifen, or aromatase inhibitors) or if said patient would have a better prognosis if treated with a further adjuvant treatment (e.g., chemotherapy) instead of, or in addition to said endocrine treatment.

[0035] A purely prognostic marker for cancer patients which is irrespective of treatment, is not the preferred solution for the need in the art as described above. Although said markers provide some indication of the aggressiveness of the tumor and therefore may guide the selection of treatment that may be required they do not take into account the heterogeneity of cancers with respect to treatment response. Therefore, a patient with poor prognosis (determined using a purely prognostic markers) may respond well to adjuvant treatment with endocrine treatment, irrespective of the aggressiveness of the disease, however if a patient is a poor responder to said treatment, an alternative and/or additional treatment will be suitable for treatment even if said patient has a good prognosis.

### BRIEF DESCRIPTION OF THE DRAWINGS

[0036] FIG. 1 illustrates a simplified model of a Stage 1-3 breast tumor wherein primary treatment was surgery (at point 1), followed by adjuvant therapy with Tamoxifen, as an example for an endocrine treatment. The Y axis represents tumor(s) mass (or size), wherein the line ‘3’ indicates the limit of detectability of said tumor mass. The X axis represents time. In a first scenario a patient without relapse during endocrine treatment (4) is shown as remaining below the limit of detectability for the duration of the observation. A patient with relapse of the cancer (5) has a period of disease free survival (2) followed by relapse when the carcinoma mass reaches the level of detectability.

[0037] FIG. 2 shows the result of the assay (QM assay) as described in Example 4: A Kaplan-Meier estimated metastasis-free survival curve for three CpG sites of the PITX2 gene by means of Real-Time methylation specific probe analysis (QM assay). The lower curve shows the proportion of metastasis free patients in the population with above median methylation levels, the upper curve shows the proportion of metastasis free patients in the population with below median methylation levels. The X axis shows the metastasis free survival times of the patients in months, and the Y axis shows the proportion of metastasis free survival patients.

[0038] FIG. 3 shows the result of the chip hybridization experiment as described in Example 2. A Kaplan-Meier estimated metastasis-free survival curves for two CpG positions of the PITX2 gene by means of methylation specific detection oligonucleotide hybridization analysis. The lower curve shows the proportion of metastasis free patients in the population with above median methylation levels, the upper curve shows the proportion of metastasis free patients in the population with below median methylation levels. The X axis shows the metastasis free survival times of the patients in months, and the Y axis shows the proportion of metastasis free survival patients.

[0039] FIG. 4 shows the Kaplan-Meier estimated metastasis-free survival curves for two CpG positions of the PITX2 gene by means of methylation specific detection oligonucleotide hybridization analysis. The lower line shows the proportion of metastasis free patients in the population of 55 patients with above median methylation levels, the upper curve shows the proportion of metastasis free patients in the population of 54 patients with below median methylation levels. The X axis shows the metastasis free survival times of the patients in years, and the Y axis shows the proportion of metastasis free survival patients in %. This resulted from a first data set that was achieved in a first study.

[0040] FIG. 5 shows the Kaplan-Meier estimated metastasis-free survival curves for six different CpG positions located within the preferred region of the PITX2 gene (SEQ ID NO:13) by means of methylation specific detection oligonucleotide hybridization analysis. The lower line shows the proportion of metastasis free patients in the population of 118 patients with above median methylation levels, the upper curve shows the proportion of metastasis free patients in the population of 118 patients with below median methylation levels. The X axis shows the metastasis free survival times of the patients in years, and the Y axis shows the proportion of metastasis free survival patients in %. This resulted from a second data set that was achieved in a second study.

[0041] FIG. 6 shows the Kaplan-Meier estimated metastasis-free survival curves for 6 different CpG positions located within the preferred region of the PITX2 gene (SEQ ID NO:13) by means of methylation specific detection oligonucleotide hybridization analysis. This time only a sub-population of 148 patients, characterized by a tumor at grade G1 or G2, was analyzed: The lower curve shows the proportion of metastasis free patients in the population of 74 patients with above median methylation levels, the upper curve shows the proportion of metastasis free patients in the population of 74 patients with below median methylation levels. The X axis shows the metastasis free survival times of the patients in years, and the Y axis shows the proportion of metastasis free survival patients in %. This resulted from a second data set as shown in the Example 2.

[0042] FIG. 7 shows the Kaplan-Meier estimated metastasis-free survival curves for 4 different CpG positions located within the preferred region of the PITX2 gene (SEQ ID NO: 13) by means of methylation specific detection oligonucleotide hybridization analysis. This time a sub-population of 224 patients, characterized by a tumor of stage 1 or 2 (T1 or T2), was analyzed: The lower curve shows the proportion of metastasis free patients in the population of 112 patients with above median methylation levels, the upper curve shows the proportion of metastasis free patients in the population of 112 patients with below median methylation levels. The X axis shows the metastasis free survival times of the patients in years, and the Y axis shows the proportion of metastasis free survival patients in %. This resulted from the second data set that was achieved in the second example.

[0043] FIG. 8 shows the disease-free survival curves of a combination of two oligonucleotides each from the genes TBC1D3 and CDK6, and one oligonucleotide from the gene PITX2 covering two CpG sites. The black curve shows the proportion of disease free patients in the population with above median methylation scores, the gray curve shows the proportion of disease free patients in the population with below median methylation scores.

[0044] FIG. 9 shows the plot according to FIG. 8 and the classification of the sample set by means of the St. Gallen method. The unbroken lines represent the methylation analysis wherein the black curve shows the proportion of disease free patients in the population with above median methylation scores, the gray curve shows the proportion of disease free patients in the population with below median methylation scores. The broken lines represent the St. Gallen classification of the sample set wherein the black curve shows the disease free survival time of the high risk group and the gray curve shows the disease free survival of the low risk group.

[0045] FIG. 10 illustrates the amino acid sequence of the polypeptide encoded by the gene PITX2.

[0046] FIG. 11 illustrates the positions of the amplificates sequenced in Example 7. ‘A’ shows an illustration of the gene with the major exons annotated, ‘B’ shows annotated mRNA transcript variants and ‘C’ shows CpG rich regions of the gene. The positions of Amplificates 1 to 11 are shown to the right of the illustrations.

[0047] FIG. 12 shows the sequencing data of 11 amplificates of the gene PITX2 according to Example 7. Each column of the matrices of columns ‘A’ and ‘B’ represent the sequencing data for one amplificate. The amplificate number is shown to the left of the matrices. Each row of a matrix represents a single CpG site within the fragment and each column represents an individual DNA sample. The matrices in the column marked ‘A’ showed below median methylation as measured by QM assays, the matrices in the column marked ‘B’ showed below median methylation as measured by QM assays.

[0048] The bar on the left represents a scale of the percent methylation, with the degree of methylation represented by the shade of each position within the column from black representing 100% methylation to light gray representing 0% methylation. White positions represented a measurement for which no data was available.

[0049] FIG. 13 shows a schematic view of mRNA transcript variants of PITX2, as annotated in the on-line Ensembl database.

[0050] FIG. 14 shows the Kaplan-Meier estimated disease-free survival curves for a CpG position of the ERBB2 gene by means of Real-Time methylation specific probe analysis according to Example 8. The X axis shows the disease free survival times of the patients in years, and the Y-axis shows the proportion of patients with disease free survival. The black plot shows the proportion of disease free patients in the population with above an optimized cut off point's methylation levels, the gray plot shows the proportion of disease free patients in the population with below an optimized cut off point's methylation levels.

[0051] FIG. 15 shows the Kaplan-Meier estimated metastasis-free survival curves for a CpG position of the ERBB2 gene by means of Real-Time methylation specific probe analysis according to Example 8. The X axis shows the disease free survival times of the patients in years, and the Y-axis shows the proportion of patients with disease free survival. The black plot shows the proportion of disease free patients in the population with above an optimized cut off point's methylation levels, the gray plot shows the proportion of disease free patients in the population with below an optimized cut off point's methylation levels.

[0052] FIG. 16 shows the Kaplan-Meier estimated metastasis-free survival curves for a CpG position of the TFF1 gene by means of Real-Time methylation specific probe analysis according to Example 8. The X axis shows the disease free survival times of the patients in years, and the Y-axis shows the proportion of patients with disease free survival. The black plot shows the proportion of disease free patients in the population with above an optimized cut off point's methylation levels, the gray plot shows the proportion of disease free patients in the population with below an optimized cut off point's methylation levels.

[0053] FIG. 17 shows the Kaplan-Meier estimated metastasis-free survival curves for a CpG position of the TFF1 gene by means of Real-Time methylation specific probe analysis according to Example 8. The X axis shows the disease free survival times of the patients in years, and the Y-axis shows the proportion of patients with disease free survival. The black plot shows the proportion of disease free patients in the population with above an optimized cut off point's methylation levels, the gray plot shows the proportion of disease free patients in the population with below an optimized cut off point's methylation levels.

[0054] FIG. 18 shows the Kaplan-Meier estimated disease-free survival curves for a CpG position of the PLAU gene by means of Real-Time methylation specific probe analysis according to Example 8. The X axis shows the disease free survival times of the patients in years, and the Y-axis shows the proportion of patients with disease free survival. The black plot shows the proportion of disease free patients in the population with above an optimized cut off point's methylation levels, the gray plot shows the proportion of disease free patients in the population with below an optimized cut off point's methylation levels.

[0055] FIG. 19 shows the Kaplan-Meier estimated metastasis-free survival curves for a CpG position of the PLAU gene by means of Real-Time methylation specific probe analysis according to Example 8. The X axis shows the disease free survival times of the patients in years, and the Y-axis shows the proportion of patients with disease free survival. The black plot shows the proportion of disease free patients in the population with above an optimized cut off point's methylation levels, the gray plot shows the proportion of disease free patients in the population with below an optimized cut off point's methylation levels.

[0056] FIG. 20 shows the Kaplan-Meier estimated disease-free survival curves for a CpG position of the PITX2 gene by means of Real-Time methylation specific probe analysis according to Example 8. The X axis shows the disease free survival times of the patients in years, and the Y-axis shows the proportion of patients with disease free survival. The black plot shows the proportion of disease free patients in the population with above an optimized cut off point's methylation levels, the gray plot shows the proportion of disease free patients in the population with below an optimized cut off point's methylation levels.

[0057] FIG. 21 shows the Kaplan-Meier estimated metastasis-free survival curves for a CpG position of the PITX2 gene by means of Real-Time methylation specific probe analysis according to Example 8. The X axis shows the disease free survival times of the patients in years, and the Y-axis shows the proportion of patients with disease free survival. The black plot shows the proportion of disease free patients in the population with above an optimized cut off point's methylation levels, the gray plot shows the proportion of disease free patients in the population with below an optimized cut off point's methylation levels.

[0058] FIG. 22 shows the Kaplan-Meier estimated disease-free survival curves for a CpG position of the TBC1D3 gene by means of Real-Time methylation specific probe analysis according to Example 8. The X axis shows the disease free survival times of the patients in years, and the Y-axis shows the proportion of patients with disease free survival. The black plot shows the proportion of disease free patients in the population with above an optimized cut off point's methylation levels, the gray plot shows the proportion of disease free patients in the population with below an optimized cut off point's methylation levels.

[0059] FIG. 23 shows the Kaplan-Meier estimated metastasis-free survival curves for a CpG position of the TBC1D3 gene by means of Real-Time methylation specific probe analysis according to Example 8. The X axis shows the disease free survival times of the patients in years, and the Y-axis shows the proportion of patients with disease free survival. The black plot shows the proportion of disease free patients in the population with above an optimized cut off point's methylation levels, the gray plot shows the proportion of disease free patients in the population with below an optimized cut off point's methylation levels.

[0060] FIG. 24 shows the Kaplan-Meier estimated disease-free survival curves for a CpG position of the ERBB2 gene by means of Real-Time methylation specific probe analysis according to Example 8. The X axis shows the disease free survival times of the patients in years, and the Y-axis shows the proportion of patients with disease free survival. The black plot shows the proportion of disease free patients in the population with above an optimized cut off point's methylation levels, the gray plot shows the proportion of disease free patients in the population with below an optimized cut off point's methylation levels.

[0061] FIG. 25 shows the Kaplan-Meier estimated metastasis-free survival curves for a CpG position of the ERBB2 gene by means of Real-Time methylation specific probe analysis according to Example 8. The X axis shows the disease free survival times of the patients in years, and the Y-axis shows the proportion of patients with disease free survival. The black plot shows the proportion of disease free patients in the population with above an optimized cut off point's methylation levels, the gray plot shows the proportion of disease free patients in the population with below an optimized cut off point's methylation levels.

[0062] FIG. 26 shows the Kaplan-Meier estimated disease-free survival curves for a CpG position of the TFF1 gene by means of Real-Time methylation specific probe analysis according to Example 8. The X axis shows the disease free survival times of the patients in years, and the Y-axis shows the proportion of patients with disease free survival. The black plot shows the proportion of disease free patients in the population with above an optimized cut off point's methylation levels, the gray plot shows the proportion of disease free patients in the population with below an optimized cut off point's methylation levels.

[0063] FIG. 27 shows the Kaplan-Meier estimated metastasis-free survival curves for a CpG position of the TFF1 gene by means of Real-Time methylation specific probe analysis according to Example 8. The X axis shows the disease free survival times of the patients in years, and the Y-axis shows the proportion of patients with disease free survival. The black plot shows the proportion of disease free patients in the population with above an optimized cut off point's methylation levels, the gray plot shows the proportion of disease free patients in the population with below an optimized cut off point's methylation levels.

[0064] FIG. 28 shows the Kaplan-Meier estimated disease-free survival curves for a CpG position of the PLAU gene by means of Real-Time methylation specific probe analysis according to Example 8. The X axis shows the disease free survival times of the patients in years, and the Y-axis shows the proportion of patients with disease free survival. The black plot shows the proportion of disease free patients in the population with above an optimized cut off point's methylation levels, the gray plot shows the proportion of disease free patients in the population with below an optimized cut off point's methylation levels.

[0065] FIG. 29 shows the Kaplan-Meier estimated metastasis-free survival curves for a CpG position of the PLAU gene by means of Real-Time methylation specific probe analysis according to Example 8. The X axis shows the disease free survival times of the patients in years, and the Y-axis shows the proportion of patients with disease free survival. The black plot shows the proportion of disease free patients in the population with above an optimized cut off point's methylation levels, the gray plot shows the proportion of disease free patients in the population with below an optimized cut off point's methylation levels.

[0066] FIG. 30 shows the Kaplan-Meier estimated disease-free survival curves for a CpG position of the PITX gene by means of Real-Time methylation specific probe analysis according to Example 8. The X axis shows the disease free survival times of the patients in years, and the Y-axis shows the proportion of patients with disease free survival. The black plot shows the proportion of disease free patients in the population with above an optimized cut off point's methylation levels, the gray plot shows the proportion of disease free patients in the population with below an optimized cut off point's methylation levels.

[0067] FIG. 31 shows the Kaplan-Meier estimated metastasis-free survival curves for a CpG position of the PITX gene by means of Real-Time methylation specific probe analysis according to Example 8. The X axis shows the disease free survival times of the patients in years, and the Y-axis shows the proportion of patients with disease free survival. The black plot shows the proportion of disease free patients in the population with above an optimized cut off point's methylation levels, the gray plot shows the proportion of disease free patients in the population with below an optimized cut off point's methylation levels.

[0068] FIG. 32 shows the Kaplan-Meier estimated disease-free survival curves for a CpG position of the PITX gene by means of Real-Time methylation specific probe analysis according to Example 8. The X axis shows the disease free survival times of the patients in years, and the Y-axis shows the proportion of patients with disease free survival. The black plot shows the proportion of disease free patients in the population with above an optimized cut off point's methylation levels, the gray plot shows the proportion of disease free patients in the population with below an optimized cut off point's methylation levels.

[0069] FIG. 33 shows the Kaplan-Meier estimated metastasis-free survival curves for a CpG position of the PITX gene by means of Real-Time methylation specific probe analysis according to Example 8. The X axis shows the disease free survival times of the patients in years, and the Y-axis shows the proportion of patients with disease free survival. The black plot shows the proportion of disease free patients in the population with above an optimized cut off point's methylation levels, the gray plot shows the proportion of disease free patients in the population with below an optimized cut off point's methylation levels.

[0070] FIG. 34 shows the Kaplan-Meier estimated disease-free survival curves for a CpG position of the ONECUT gene by means of Real-Time methylation specific probe analysis according to Example 8. The X axis shows the disease free survival times of the patients in years, and the Y-axis shows the proportion of patients with disease free survival. The black plot shows the proportion of disease free patients in the population with above an optimized cut off point's methylation levels, the gray plot shows the proportion of disease free patients in the population with below an optimized cut off point's methylation levels.

[0071] FIG. 35 shows the Kaplan-Meier estimated metastasis-free survival curves for a CpG position of the ONECUT gene by means of Real-Time methylation specific probe analysis according to Example 8. The X axis shows the disease free survival times of the patients in years, and the Y-axis shows the proportion of patients with disease free survival. The black plot shows the proportion of disease free patients in the population with above an optimized cut off point's methylation levels, the gray plot shows the proportion of disease free patients in the population with below an optimized cut off point's methylation levels.

[0072] FIG. 36 shows the Kaplan-Meier estimated disease-free survival curves for a CpG position of the TBC1D3 gene by means of Real-Time methylation specific probe analysis according to Example 8. The X axis shows the disease free survival times of the patients in years, and the Y-axis shows the proportion of patients with disease free survival. The black plot shows the proportion of disease free patients in the population with above an optimized cut off point's methylation levels, the gray plot shows the proportion of disease free patients in the population with below an optimized cut off point's methylation levels.

[0073] FIG. 37 shows the Kaplan-Meier estimated metastasis-free survival curves for a CpG position of the TBC1D3 gene by means of Real-Time methylation specific probe analysis according to Example 8. The X axis shows the disease free survival times of the patients in years, and the Y-axis shows the proportion of patients with disease free survival. The black plot shows the proportion of disease free patients in the population with above an optimized cut off point's methylation levels, the gray plot shows the proportion of disease free patients in the population with below an optimized cut off point's methylation levels.

[0074] FIG. 38 shows the Kaplan-Meier estimated disease-free survival curves for a CpG position of the ABCA8 gene by means of Real-Time methylation specific probe analysis according to Example 8. The X axis shows the disease free survival times of the patients in years, and the Y-axis shows the proportion of patients with disease free survival. The black plot shows the proportion of disease free patients in the population with above an optimized cut off point's methylation levels, the gray plot shows the proportion of disease free patients in the population with below an optimized cut off point's methylation levels.

[0075] FIG. 39 shows the Kaplan-Meier estimated metastasis-free survival curves for a CpG position of the ABCA8 gene by means of Real-Time methylation specific probe analysis according to Example 8. The X axis shows the disease free survival times of the patients in years, and the Y-axis shows the proportion of patients with disease free survival. The black plot shows the proportion of disease free patients in the population with above an optimized cut off point's methylation levels, the gray plot shows the proportion of disease free patients in the population with below an optimized cut off point's methylation levels.

[0076] FIG. 40 shows the Kaplan-Meier estimated disease-free survival curves for a CpG position of a combination of the TFF1 & PLAU genes by means of Real-Time methylation specific probe analysis according to Example 8. he X axis shows the disease free survival times of the patients in years, and the Y-axis shows the proportion of patients with disease free survival. The black plot shows the proportion of disease free patients in the population with above an optimized cut off point's methylation levels, the gray plot shows the proportion of disease free patients in the population with below an optimized cut off point's methylation levels.

[0077] FIG. 41 shows the Kaplan-Meier estimated metastasis-free survival curves for a CpG position of a combination of the TFF1 & PLAU genes by means of Real-Time methylation specific probe analysis according to Example 8. The X axis shows the disease free survival times of the patients in years, and the Y-axis shows the proportion of patients with disease free survival. The black plot shows the proportion of disease free patients in the population with above an optimized cut off point's methylation levels, the gray plot shows the proportion of disease free patients in the population with below an optimized cut off point's methylation levels.

[0078] FIG. 42 shows the Kaplan-Meier estimated disease-free survival curves for a CpG position of a combination of the TFF1 & PLAU & PITX genes by means of Real-Time methylation specific probe analysis according to Example 8. The X axis shows the disease free survival times of the patients in years, and the Y-axis shows the proportion of patients with disease free survival. The black plot shows the proportion of disease free patients in the population with above an optimized cut off point's methylation levels, the gray plot shows the proportion of disease free patients in the population with below an optimized cut off point's methylation levels.

[0079] FIG. 43 shows the Kaplan-Meier estimated metastasis-free survival curves for a CpG position of a combination of the TFF1 & PLAU & PITX genes by means of Real-Time methylation specific probe analysis according to Example 8. The X axis shows the disease free survival times of the patients in years, and the Y-axis shows the proportion of patients with disease free survival. The black plot shows the proportion of disease free patients in the population with above an optimized cut off point's methylation levels, the gray plot shows the proportion of disease free patients in the population with below an optimized cut off point's methylation levels.

[0080] FIG. 44 shows the Kaplan-Meier estimated disease-free survival curves for a CpG position of a combination of the PITX & TFF1 genes by means of Real-Time methylation specific probe analysis according to Example 8. The X axis shows the disease free survival times of the patients in years, and the Y-axis shows the proportion of patients with disease free survival. The black plot shows the proportion of disease free patients in the population with above an optimized cut off point's methylation levels, the gray plot shows the proportion of disease free patients in the population with below an optimized cut off point's methylation levels.

[0081] FIG. 45 shows the Kaplan-Meier estimated metastasis-free survival curves for a CpG position a combination of the PITX & TFF1 genes by means of Real-Time methylation specific probe analysis according to Example 8. The X axis shows the disease free survival times of the patients in years, and the Y-axis shows the proportion of patients with disease free survival. The black plot shows the proportion of disease free patients in the population with above an optimized cut off point's methylation levels, the gray plot shows the proportion of disease free patients in the population with below an optimized cut off point's methylation levels.

[0082] FIG. 46 shows the Kaplan-Meier estimated disease-free survival curves for a CpG position of a combination of the PITX & PLAU genes by means of Real-Time methylation specific probe analysis according to Example 8. The X axis shows the disease free survival times of the patients in years, and the Y-axis shows the proportion of patients with disease free survival. The black plot shows the proportion of disease free patients in the population with above an optimized cut off point's methylation levels, the gray plot shows the proportion of disease free patients in the population with below an optimized cut off point's methylation levels.

[0083] FIG. 47 shows the Kaplan-Meier estimated metastasis-free survival curves for a CpG position of a combination of the PITX & PLAU genes by means of Real-Time methylation specific probe analysis according to Example 8. The X axis shows the disease free survival times of the patients in years, and the Y-axis shows the proportion of patients with disease free survival. The black plot shows the proportion of disease free patients in the population with above an optimized cut off point's methylation levels, the gray plot shows the proportion of disease free patients in the population with below an optimized cut off point's methylation levels.

[0084] FIG. 48 shows the Kaplan-Meier estimated disease-free survival curves for a CpG position of a combination of the TFF1 & PLAU genes by means of Real-Time methylation specific probe analysis according to Example 8. The X axis shows the disease free survival times of the patients in years, and the Y-axis shows the proportion of patients with disease free survival. The black plot shows the proportion of disease free patients in the population with above an optimized cut off point's methylation levels, the gray plot shows the proportion of disease free patients in the population with below an optimized cut off point's methylation levels.

[0085] FIG. 49 shows the Kaplan-Meier estimated metastasis-free survival curves for a CpG position of a combination of the TFF1 & PLAU genes by means of Real-Time methylation specific probe analysis according to Example 8. The X axis shows the disease free survival times of the patients in years, and the Y-axis shows the proportion of patients with disease free survival. The black plot shows the proportion of disease free patients in the population with above an optimized cut off point's methylation levels, the gray plot shows the proportion of disease free patients in the population with below an optimized cut off point's methylation levels.

[0086] FIG. 50 shows the Kaplan-Meier estimated disease-free survival curves for a CpG position of a combination of the TFF1 & PLAU & PITX genes by means of Real-Time methylation specific probe analysis according to Example 8. The X axis shows the disease free survival times of the patients in years, and the Y-axis shows the proportion of patients with disease free survival. The black plot shows the proportion of disease free patients in the population with above an optimized cut off point's methylation levels, the gray plot shows the proportion of disease free patients in the population with below an optimized cut off point's methylation levels.

[0087] FIG. 51 shows the Kaplan-Meier estimated metastasis-free survival curves for a CpG position of a combination of the TFF1 & PLAU & PITX genes by means of Real-Time methylation specific probe analysis according to Example 8. The X axis shows the disease free survival times of the patients in years, and the Y-axis shows the proportion of patients with disease free survival. The black plot shows the proportion of disease free patients in the population with above an optimized cut off point's methylation levels, the gray plot shows the proportion of disease free patients in the population with below an optimized cut off point's methylation levels.

[0088] FIG. 52 shows the Kaplan-Meier estimated disease-free survival curves for a CpG position of a combination of the PITX & TFF1 genes by means of Real-Time methylation specific probe analysis according to Example 8. The X axis shows the disease free survival times of the patients in years, and the Y-axis shows the proportion of patients with disease free survival. The black plot shows the proportion of disease free patients in the population with above an optimized cut off point's methylation levels, the gray plot shows the proportion of disease free patients in the population with below an optimized cut off point's methylation levels.

[0089] FIG. 53 shows the Kaplan-Meier estimated metastasis-free survival curves for a CpG position of a combination of the PITX & TFF1 genes by means of Real-Time methylation specific probe analysis according to Example 8. The X axis shows the disease free survival times of the patients in years, and the Y-axis shows the proportion of patients with disease free survival. The black plot shows the proportion of disease free patients in the population with above an optimized cut off point's methylation levels.

[0090] FIG. 54 shows the Kaplan-Meier estimated disease-free survival curves for a CpG position of a combination of the PITX & PLAU genes by means of Real-Time methylation specific probe analysis according to Example 8. The X axis shows the disease free survival times of the patients in years, and the Y-axis shows the proportion of patients with disease free survival. The black plot shows the proportion of disease free patients in the population with above an optimized cut off point's methylation levels, the gray plot shows the proportion of disease free patients in the population with below an optimized cut off point's methylation levels.

[0091] FIG. 55 shows the Kaplan-Meier estimated metastasis-free survival curves for a CpG position of a combination of the PITX & PLAU genes by means of Real-Time methylation specific probe analysis according to Example 8. The X axis shows the disease free survival times of the patients in years, and the Y-axis shows the proportion of patients with metastasis free survival. The black plot shows the proportion of metastasis free patients in the population with above an optimized cut off point's methylation levels, the gray plot shows the proportion of disease free patients in the population with below an optimized cut off point's methylation levels.

[0092] FIG. 56 shows a scatter plot of matched pair PET and fresh frozen tissues analyzed using PITX2 gene assay 1 according to Example 8. Quantitative methylation CT scores of PET samples are shown on the Y-axis, and quantitative methylation CT scores of fresh frozen samples are shown on the X-axis. The association between the paired samples is 0.81 (Spearman's rho). This analysis is based on n=89 samples.

[0093] FIG. 57 shows the Disease free survival (DFS) of randomly selected ER+, N0, untreated patient population in Kaplan-Meier survival plot according to Example 8. Proportion of disease free patients is shown on the Y-axis and time in years is shown on the X-axis. 139 events were observed (observed event rate=33%). Disease free survival after 5 years: 74.5% [70.3%, 78.9%], after 10 years 59.8% [54.2%, 66%]. 95% confidence intervals are plotted.

[0094] FIG. 58 shows the distribution of follow-up times in ER+, N0, untreated population according to Example 8. Frequency is shown on the Y-axis and time in months is shown on the X-axis. The figure on the left shows patients with event (all kinds of relapses). Mean follow-up time 45.8 months (standard deviation=31), median=38 (range=[2, 123]). The figure on the right shows censored patients. Mean follow up time 93 months (standard deviation=35.6), median=94 (range=[1, 190]).

[0095] FIG. 59 shows the Disease free survival (DFS) of ER+, N0, TAM treated population in Kaplan-Meier plot according to Example 8. Proportion of disease free patients is shown on the Y-axis and time in years is shown on the X-axis. 56 events were observed (observed event rate=10%). DFS after 5 years: 92.4% [90%, 94.9%], after 10 years: 82.1% [77.3%, 87.2%]. 95% confidence intervals are plotted.

[0096] FIG. 60 shows the distribution of follow-up times in ER+, N0, untreated population according to Example 8. Frequency is shown on the Y-axis and time in months is shown on the X-axis. The figure on the left shows patients with all events (all kinds of relapses). Mean follow-up time 47.9 months (standard deviation=24.4), median=45 (range=[2, 98]). The figure on the right shows censored patients. Mean follow up time 65.3 months (standard deviation=31.6), median=64 (range=[0, 158]).

[0097] FIG. 61 shows the ROC plot at different times for marker model 3522 (Assay 1) and 2265 on ER+N0 TAM treated population according to Example 8. FIG. A shows the plot at 60 months, FIG. B shows the plot at 72 months, FIG. C shows the plot at 84 months and FIG. D shows the plot at 96 months. Only distant metastasis are defined as events. Sensitivity (proportion of all relapsed patients in poor prognostic group) shown on the X-axis and specificity (proportion of all relapse free patients in good prognostic group) shown on the Y-axis are calculated from KM estimates, and the estimated area under the curve (AUC) is calculated. Values for median cut off (triangle) and best cut off (diamond, 0.32 quantile) are plotted.

[0098] FIG. 62 shows the ROC plot at different times for marker model 3522 (Assay 1) alone on ER+N0 TAM treated population according to Example 8. FIG. A shows the plot at 60 months, FIG. B shows the plot at 72 months, FIG. C shows the plot at 84 months and FIG. D shows the plot at 96 months. Only distant metastasis are defined as events. Sensitivity (proportion of all relapsed patients in poor prognostic group) shown on the X-axis and specificity (proportion of all relapse free patients in good prognostic group) shown on the Y-axis are calculated from KM estimates, and the estimated area under the curve (AUC) is calculated. Values for median cut off (triangle) and best cut off (diamond, 0.42 quantile) are plotted.

[0099] FIG. 63 shows the ROC plot at different times for marker model 2265 on ER+N0 TAM treated population according to Example 8. FIG. A shows the plot at 60 months, FIG. B shows the plot at 72 months, FIG. C shows the plot at 84 months and FIG. D shows the plot at 96 months. Only distant metastasis are defined as events. Sensitivity (proportion of all relapsed patients in poor prognostic group) shown on the X-axis and specificity (proportion of all relapse free patients in good prognostic group) shown on the Y-axis are calculated from KM estimates for different thresholds (=5, 6, 7, 8 years) and the estimated area under the curve (AUC) is calculated. Values for median cut off (triangle) and best cut off (diamond, 0.78 quantile) are plotted.

[0100] FIG. 64 shows the ROC plot at different times for marker model 2395 on ER+N0 TAM treated population according to Example 8. FIG. A shows the plot at 60 months, FIG. B shows the plot at 72 months, FIG. C shows the plot at 84 months and FIG. D shows the plot at 96 months. Only distant metastasis are defined as events. Sensitivity (proportion of all relapsed patients in poor prognostic group) shown on the X-axis and specificity (proportion of all relapse free patients in good prognostic group) shown on the Y-axis are calculated from KM estimates for different thresholds (=5, 6, 7, 8 years), and the estimated area under the curve (AUC) is calculated. Values for median cut off (triangle) and best cut off (diamond, 0.77 quantile) are plotted.

### SUMMARY OF THE INVENTION

[0101] In a preferred aspect, the present invention provides a prognostic marker, PITX2 (which shall be recognized as the gene encoding for the protein PITX2; and the mRNA transcript thereof being described in accession number NM_{—}153426), which, however, is not ‘purely prognostic’. This marker provides a solution to the need in the art as outlined above, by providing guiding information on the question of whether or not an adjuvant chemotoxic therapy shall be subscribed in addition to treatment with endocrines, like tamoxifen, or whether this is an unnecessary burden to the patient.

[0102] It is herein disclosed that aberrant expression of the gene PITX2 is correlated to prognosis and/or predicted outcome of endocrine (e.g., estrogen) treatment of breast cell proliferative disorder patients, in particular breast carcinoma.

[0103] This marker thereby provides a novel and highly beneficial means for the characterization of breast carcinomas. Aberrant expression of the gene PITX2 is indicative of the relapse and/or survival of a breast carcinoma patient. The herein described invention is thereby particularly useful for making improved treatment decisions.

[0104] The marker is also indicative of the relapse and/or survival of said patients when treated with one or more treatments which target the estrogen receptor, synthesis or conversion pathways or are otherwise involved in estrogen metabolism, production or secretion.

[0105] The herein described invention is thereby particularly useful for the differentiation of individuals who may be appropriately treated with one or more treatments which target the estrogen receptor pathway or are involved in estrogen metabolism, production or secretion from those individuals who would be optimally treated with other treatments in addition to or instead of said treatment. Preferred ‘other treatments’ include but are not limited to chemotherapies or radiotherapies

[0106] Accordingly it is particularly preferred that said marker be used in the treatment of breast cancer patients by enabling the classification of patients according to their likely treatment outcome wherein said patients are treated with an adjuvant therapy targeting the endocrine pathways. It is further preferred that patients with a poor treatment outcome are provided with a further adjuvant treatment instead of or in addition to said endocrine therapy, in particular but not limited to chemotherapy. A marker suitable for said purpose shall hereinafter also be referred to as an ‘adjuvant marker.’

[0107] This invention also relates to the use of PITX2, as an ‘adjuvant marker’, which also serves as a ‘prognostic marker’, especially in hormone receptor negative women, which would not get any endocrine treatment at all.

### DETAILED DESCRIPTION OF THE INVENTION

[0108] Characterization of a breast cancer in terms of prognosis and/or treatment outcome enables the physician to make an informed decision as to a therapeutic regimen with appropriate risk and benefit trade off's to the patient.

[0109] In the context of the present invention the terms “estrogen receptor positive” and/or “progesterone receptor positive” when used to describe a breast cell proliferative disorder are taken to mean that the proliferating cells express said hormone receptor.

[0110] In the context of the present invention the term ‘aggressiveness’ is taken to mean one or more of: high likelihood of relapse post surgery; below average or below median patient survival; below average or below median disease free survival; below average or below median relapse-free survival; above average tumor-related complications; fast progression of tumor or metastases. According to the aggressiveness of the disease an appropriate treatment or treatments may be selected from the group consisting of chemotherapy, radiotherapy, surgery, biological therapy, immunotherapy, antibody treatments, treatments involving molecularly targeted drugs, estrogen receptor modulator treatments, estrogen receptor down-regulator treatments, aromatase inhibitors treatments, ovarian ablation, treatments providing LHRH analogues or other centrally acting drugs influencing estrogen production. Wherein a cancer is characterized as ‘aggressive’ it is particularly preferred that a treatment such as, but not limited to, chemotherapy is provided in addition to or instead of an endocrine targeting therapy.

[0111] Indicators of tumor aggressiveness standard in the art include but are not limited to, tumor stage, tumor grade, nodal status and survival.

[0112] Unless stated otherwise as used herein the term “survival” shall be taken to include all of the following: survival until mortality, also known as overall survival (wherein said mortality may be either irrespective of cause or breast tumor related); “recurrence-free survival” (wherein the term recurrence shall include both localized and distant recurrence); metastasis free survival; disease free survival (wherein the term disease shall include breast cancer and diseases associated therewith). The length of said survival may be calculated by reference to a defined start point (e.g., time of diagnosis or start of treatment) and end point (e.g., death, recurrence or metastasis).

[0113] As used herein the term “prognostic marker” shall be taken to mean an indicator of the likelihood of progression of the disease, in particular aggressiveness and metastatic potential of a breast tumor.

[0114] As used herein the term ‘predictive marker’ shall be taken to mean an indicator of response to therapy, said response is preferably defined according to patient survival. It is preferably used to define patients with high, low and intermediate length of survival or recurrence after treatment, that is the result of the inherent heterogeneity of the disease process.

[0115] As defined herein the term ‘predictive marker’ may in some situations fall within the remit of a herein described ‘prognostic marker’, for example, wherein a prognostic marker differentiates between patients with different survival outcomes pursuant to a treatment, said marker is also a predictive marker for said treatment. Therefore, unless otherwise stated the two terms shall not be taken to be mutually exclusive.

[0116] As used herein the term ‘expression’ shall be taken to mean the transcription and translation of a gene, as well as the genetic or the epigenetic modifications of the genomic DNA associated with the marker gene and/or regulatory or promoter regions thereof. Genetic modifications include SNPs, point mutations, deletions, insertions, repeat length, rearrangements and other polymorphisms. The analysis of either the expression levels of protein, or mRNA or the analysis of the patient's individual genetic or epigenetic modification of the marker gene are herein summarized as the analysis of ‘expression of the gene.

[0117] The level of expression of a gene may be determined by the analysis of any factors associated with or indicative of the level of transcription and translation of a gene including but not limited to methylation analysis, loss of heterozygosity (hereinafter also referred to as LOH), RNA expression levels and protein expression levels.

[0118] Furthermore the activity of the transcribed gene may be affected by genetic variations such as but not limited to genetic modifications (including but not limited to SNPs, point mutations, deletions, insertions, repeat length, rearrangements and other polymorphisms).

[0119] The terms “endocrine therapy” or “endocrine treatment” are meant to comprise any therapy, treatment or treatments targeting the estrogen receptor pathway or estrogen synthesis pathway or estrogen conversion pathway, which is involved in estrogen metabolism, production or secretion. Said treatments include, but are not limited to estrogen receptor modulators, estrogen receptor down-regulators, aromatase inhibitors, ovarian ablation, LHRH analogues and other centrally acting drugs influencing estrogen production.

[0120] The term “monotherapy” shall be taken to mean the use of a single drug or other therapy.

[0121] In the context of the present invention the term “chemotherapy” is taken to mean the use of pharmaceutical or chemical substances to treat cancer. This definition excludes radiation therapy (treatment with high energy rays or particles), hormone therapy (treatment with hormones or hormone analogues) and surgical treatment.

[0122] In the context of the present invention the term “adjuvant treatment” is taken to mean a therapy of a cancer patient immediately following an initial non-chemotherapeutical therapy, (e.g., surgery). In general, the purpose of an adjuvant therapy is to decrease the risk of recurrence.

[0123] In the context of the present invention the term “determining a suitable treatment regimen for the subject” is taken to mean the determination of a treatment regimen (i.e., a single therapy or a combination of different therapies that are used for the prevention and/or treatment of the cancer in the patient) for a patient that is started, modified and/or ended based or essentially based or at least partially based on the results of the analysis according to the present invention. One example is starting an adjuvant endocrine therapy after surgery, another would be to modify the dosage of a particular chemotherapy. The determination can, in addition to the results of the analysis according to the present invention, be based on personal characteristics of the subject to be treated. In most cases, the actual determination of the suitable treatment regimen for the subject will be performed by the attending physician or doctor.

[0124] In the context of this invention the terms “obtaining a biological sample” or “obtaining a sample from a subject”, shall not be taken to include the active retrieval of a sample from an individual, (e.g., the performance of a biopsy). Said terms shall be taken to mean the obtainment of a sample previously isolated from an individual. Said samples may be isolated by any means standard in the art, including but not limited to biopsy, surgical removal, body fluids isolated by means of aspiration. Furthermore said samples may be provided by third parties including but not limited to clinicians, couriers, commercial sample providers and sample collections.

[0125] In the context of the present invention, the term “CpG island” refers to a contiguous region of genomic DNA that satisfies the criteria of (I) having a frequency of CpG dinucleotides corresponding to an “Observed/Expected Ratio”>0.6, and (2) having a “GC Content”>0.5. CpG islands are typically, but not always, between about 0.2 to about 1 kb in length.

[0126] In the context of the present invention the term “regulatory region” of a gene is taken to mean nucleotide sequences which affect the expression of a gene. Said regulatory regions may be located within, proximal or distal to said gene. Said regulatory regions include but are not limited to constitutive promoters, tissue-specific promoters, developmental-specific promoters, inducible promoters and the like. Promoter regulatory elements may also include certain enhancer sequence elements that control transcriptional or translational efficiency of the gene.

[0127] In the context of the present invention, the term “methylation” refers to the presence or absence of 5-methylcytosine (“5-mCyt”) at one or a plurality of CpG dinucleotides within a DNA sequence.

[0128] In the context of the present invention the term “methylation state” is taken to mean the degree of methylation present in a nucleic acid of interest, this may be expressed in absolute or relative terms (i.e., as a percentage or other numerical value) or by comparison to another tissue and therein described as hypermethylated, hypomethylated or as having significantly similar or identical methylation status.

[0129] In the context of the present invention, the term “hemi-methylation” or “hemimethylation” refers to the methylation state of a CpG methylation site, where only a single cytosine in one of the two CpG dinucleotide sequences of the double stranded CpG methylation site is methylated (e.g., 5′-NNC^{M}GNN-3′ (top strand): 3′-NNGCNN-5′ (bottom strand)).

[0130] In the context of the present invention, the term “hypermethylation” refers to the average methylation state corresponding to an increased presence of 5-mCyt at one or a plurality of CpG dinucleotides within a DNA sequence of a test DNA sample, relative to the amount of 5-mCyt found at corresponding CpG dinucleotides within a normal control DNA sample.

[0131] In the context of the present invention, the term “hypomethylation” refers to the average methylation state corresponding to a decreased presence of 5-mCyt at one or a plurality of CpG dinucleotides within a DNA sequence of a test DNA sample, relative to the amount of 5-mCyt found at corresponding CpG dinucleotides within a normal control DNA sample.

[0132] In the context of the present invention, the term “microarray” refers broadly to both “DNA microarrays,” and ‘DNA chip(s),’ as recognized in the art, encompasses all art-recognized solid supports, and encompasses all methods for affixing nucleic acid molecules thereto or synthesis of nucleic acids thereon.

[0133] “Genetic parameters” are mutations and polymorphisms of genes and sequences further required for their regulation. To be designated as genetic modifications or mutations are, in particular, insertions, deletions, point mutations, inversions and polymorphisms and, particularly preferred, SNPs (single nucleotide polymorphisms).

[0134] “Epigenetic modifications” or “epigenetic parameters” are modifications of DNA bases of genomic DNA and sequences further required for their regulation, in particular, cytosine methylations thereof. Further epigenetic parameters include, for example, the acetylation of histones which, however, cannot be directly analyzed using the described method but which, in turn, correlate with the DNA methylation.

[0135] In the context of the present invention, the term “bisulfite reagent” refers to a reagent comprising bisulfite, disulfite, hydrogen sulfite or combinations thereof, useful as disclosed herein to distinguish between methylated and unmethylated CpG dinucleotide sequences.

[0136] In the context of the present invention, the term “Methylation assay” refers to any assay for determining the methylation state of one or more CpG dinucleotide sequences within a sequence of DNA.

[0137] In the context of the present invention, the term “MS.AP-PCR” (Methylation-Sensitive Arbitrarily-Primed Polymerase Chain Reaction) refers to the art-recognized technology that allows for a global scan of the genome using CG-rich primers to focus on the regions most likely to contain CpG dinucleotides, and described by Gonzalgo et al., Cancer Research 57:594-599, 1997.

[0138] In the context of the present invention, the term “MethyLight™” refers to the art-recognized fluorescence-based real-time PCR technique described by Eads et al., Cancer Res. 59:2302-2306, 1999.

[0139] In the context of the present invention, the term “HeavyMethyl™” assay, in the embodiment thereof implemented herein, refers to a methylation assay comprising methylation specific blocking probes covering CpG positions between the amplification primers.

[0140] The term “Ms-SNuPE” (Methylation-sensitive Single Nucleotide Primer Extension) refers to the art-recognized assay described by Gonzalgo & Jones, Nucleic Acids Res. 25:2529-2531, 1997.

[0141] In the context of the present invention the term “MSP” (Methylation-specific PCR) refers to the art-recognized methylation assay described by Herman et al. Proc. Natl. Acad. Sci. USA 93:9821-9826, 1996, and by U.S. Pat. No. 5,786,146.

[0142] In the context of the present invention the term “COBRA” (Combined Bisulfite Restriction Analysis) refers to the art-recognized methylation assay described by Xiong & Laird, Nucleic Acids Res. 25:2532-2534, 1997.

[0143] In the context of the present invention the term “hybridization” is to be understood as a bond of an oligonucleotide to a complementary sequence along the lines of the Watson-Crick base pairings in the sample DNA, forming a duplex structure.

[0144] “Stringent hybridization conditions,” as defined herein, involve hybridizing at 68° C. in 5×SSC/5× Denhardt's solution/1.0% SDS, and washing in 0.2×SSC/0.1% SDS at room temperature, or involve the art-recognized equivalent thereof (e.g., conditions in which a hybridization is carried out at 60° C. in 2.5×SSC buffer, followed by several washing steps at 37° C. in a low buffer concentration, and remains stable). Moderately stringent conditions, as defined herein, involve including washing in 3×SSC at 42° C., or the art-recognized equivalent thereof. The parameters of salt concentration and temperature can be varied to achieve the optimal level of identity between the probe and the target nucleic acid. Guidance regarding such conditions is available in the art, for example, by Sambrook et al., 1989, Molecular Cloning, A Laboratory Manual, Cold Spring Harbor Press, N.Y.; and Ausubel et al. (eds.), 1995, Current Protocols in Molecular Biology, (John Wiley & Sons, N.Y.) at Unit 2.10.

[0145] “Background DNA” as used herein refers to any nucleic acids which originate from sources other than breast cells.

[0146] Using the methods and nucleic acids described herein, statistically significant models of patient relapse, disease free survival, metastasis free survival, overall survival and/or disease progression can be developed and utilized to assist patients and clinicians in determining suitable treatment options to be included in the therapeutic regimen.

[0147] In one aspect the method provides a prognostic marker for a cell proliferative disorder of the breast tissues. Preferably this prognosis is provided in terms of an outcome selected from the group consisting of likelihood of relapse; overall patient survival; metastasis free survival; disease free survival or disease progression.

[0148] In a further aspect of the invention said marker is used as a predictive marker of outcome of a treatment which targets the estrogen receptor pathway or is involved in estrogen metabolism, production or secretion as a therapy for patients suffering from a cell proliferative disorder of the breast tissues. This aspect of the method enables the physician to determine which treatments may be used in addition to or instead of said endocrine treatment. It is preferred that said additional treatment is a more aggressive therapy such as, but not limited to, chemotherapy. Thus, the present invention will be seen to reduce the problems associated with present breast cell proliferative disorder prognostic, predictive and treatment response prediction methods.

[0149] Using the methods and nucleic acids as described herein, patient survival can be evaluated before or during treatment for a cell proliferative disorder of the breast tissues, in order to provide critical information to the patient and clinician as to the likely progression of the disease. It will be appreciated, therefore, that the methods and nucleic acids exemplified herein can serve to improve a patient's quality of life and odds of treatment success by allowing both patient and clinician a more accurate assessment of the patient's treatment options.

[0150] The herein disclosed method may be used for the improved treatment of all breast cell proliferative disorder patients, both pre- and post-menopausal and independent of their node or estrogen receptor status. However, it is particularly preferred that said patients are node-negative and estrogen receptor positive.

[0151] The present invention makes available a method for the improved treatment of breast cell proliferative disorders, by enabling the improved prediction of a patient's survival, in particular by predicting the likelihood of relapse post-surgery, both with or without adjuvant endocrine treatment. Furthermore, the present invention provides a means for the improved prediction of treatment outcome with endocrine therapy, wherein said therapy comprises one or more treatments which target the estrogen receptor pathway or are involved in estrogen metabolism, production, or secretion.

[0152] The method according to the invention may be used for the analysis of a wide variety of cell proliferative disorders of the breast tissues including, but not limited to, ductal carcinoma in situ, invasive ductal carcinoma, invasive lobular carcinoma, lobular carcinoma in situ, comedocarcinoma, inflammatory carcinoma, mucinous carcinoma, scirrhous carcinoma, colloid carcinoma, tubular carcinoma, medullary carcinoma, metaplastic carcinoma, and papillary carcinoma and papillary carcinoma in situ, undifferentiated or anaplastic carcinoma and Paget's disease of the breast.

[0153] The method according to the invention may be used to provide a prognosis of breast cell proliferative disorder patients, furthermore said method may be used to provide a prediction of patient survival and/or relapse following treatment by endocrine therapy.

[0154] Wherein the herein disclosed markers, methods and nucleic acids are used as prognostic markers it is particularly preferred that said prognosis is defined in terms of patient survival and/or relapse. In this embodiment, patients survival times and/or relapse are predicted according to their gene expression or genetic or epigenetic modifications thereof. In this aspect of the invention it is particularly preferred that said patients are tested prior to receiving any adjuvant endocrine treatment.

[0155] Wherein the herein disclosed markers, methods and nucleic acids are used as predictive markers it is particularly preferred that the method is applied to predict the outcome of patients who receive endocrine treatment as secondary treatment to an initial non chemotherapeutical therapy, for example, surgery (hereinafter referred to as the ‘adjuvant setting’) as illustrated in FIG. 1. Such a treatment is often prescribed to patients suffering from Stage 1 to 3 breast carcinomas. It is also preferred that said ‘outcome’ is defined in terms of patients survival and/or relapse.

[0156] In this embodiment, patients survival times and/or relapse are predicted according to their gene expression or genetic or epigenetic modifications thereof. By detecting patients with below average or below median metastasis free survival or disease free survival times and/or high likelihood of relapse the physician may choose to recommend the patient for further treatment, instead of or in addition to the endocrine targeting therapy(s), in particular but not limited to, chemotherapy.

[0157] Aspects of the herein described invention provide, inter alia, a novel breast cell proliferative disorder prognostic and predictive biomarker.

[0158] It is herein described that aberrant expression of the gene PITX2 and/or regulatory or promoter regions thereof is correlated to prognosis and/or prediction of outcome of estrogen treatment of breast cell proliferative disorder patients, in particular breast carcinoma.

[0159] This marker thereby provides a novel means for the characterization of breast cell proliferative disorders. As described herein determination of the expression of the gene PITX2 and/or regulatory or promoter regions thereof enables the prediction of prognosis of a patient with a proliferative disorder of the breast tissues.

[0160] In an alternative embodiment, the expression of the gene PITX2 and/or regulatory or promoter regions thereof enables the prediction of treatment response of a patient treated with one or more treatments which target the estrogen receptor, synthesis or conversion pathways or are otherwise involved in estrogen metabolism, production or secretion.

[0161] The herein described invention is thereby useful for the differentiation of individuals who may be appropriately treated with one or more treatments which target the estrogen receptor pathway or are involved in estrogen metabolism, production or secretion from those individuals, who would be optimally treated with other treatments in addition to said treatment.

[0162] Preferred ‘other treatments’ include but are not limited to chemotherapy or radiotherapy. It is particularly preferred that said prognosis and/or treatment response is stated in terms of likelihood of relapse, survival or outcome.

[0163] In a further embodiment of the invention, the aberrant expression of a plurality of genes comprising the gene PITX2 and/or regulatory or promoter regions thereof is analyzed. Said plurality of genes is hereinafter also referred to as a ‘gene panel’. The analysis of multiple genes increases the accuracy of a provided prognosis and/or prediction of estrogen treatment outcome. It is preferred that the gene panel consists of up to seven genes and/or their promoter regions associated with prognosis and/or prediction of treatment response of breast carcinoma patients. It is further preferred that said panel consists of the gene PITX2 and one or more genes selected from the group consisting of ABCA8, CDK6, ERBB2, ONECUT2, PLAU, TBC1D3 and TFF1 and/or regulatory regions thereof.\It is particularly preferred that the gene panel is selected from the group of gene panels consisting of:
[0164] PITX2, PLAU and TFF1;
[0165] PITX2 and PLAU; and
[0166] PITX2 and TFF1.

[0167] It is particularly preferred that the gene panel consisting PITX2 and TFF1 is used to predict outcome of treatment of patients with an endocrine treatment. It is particularly preferred that the gene panel consisting PITX2 and PLAU is used to provide a prognosis of patients. It is preferred that said patients are analyzed prior to receiving any endocrine treatment.

[0168] In further embodiments this invention relates to new methods and sequences for the prognosis of patients diagnosed with breast cell proliferative disease.

[0169] In yet a further aspect, the invention relates to new methods and sequences, which may be used as tools for the selection of suitable treatments of patients diagnosed with breast cell proliferative disease based on a prediction of likelihood of relapse, survival or outcome.

[0170] More specifically, aspects of this invention provide new methods and sequences for patients diagnosed with breast cell proliferative disease, allowing the improved selection of suitable adjuvant therapy. Furthermore, it is preferred that patients with poor prognosis following endocrine monotherapy are provided with chemotherapy in addition to or instead of an endocrine therapy.

[0171] One aspect of the invention is the provision of methods for providing a prognosis and/or prediction of outcome of endocrine treatment of a patient with a cell proliferative disorder of the breast tissues. Preferably said prognosis and/or prediction is provided in terms of likelihood of relapse or the survival of said patient. It is further preferred that said survival is disease free survival or metastasis free survival. It is also preferred that said disease is breast cancer. These methods comprise the analysis of the expression levels of the gene PITX2 and/or regulatory regions thereof.

[0172] In further embodiments the method comprises analysis of the expression of a ‘gene panel’ comprising the gene PITX2 and one or more genes selected from the group consisting of ABCA8, CDK6, ERBB2, ONECUT2, PLAU, TBC1D3 and TFF1 and/or regulatory regions thereof. It is particularly preferred that said gene panels are selected from the group of gene panels consisting of:
[0173] PITX2, PLAU and TFF1
[0174] PITX2 and PLAU
[0175] PITX2 and TFF1

[0176] It is particularly preferred that the expression of the gene panel consisting PITX2 and TFF1 is determined in order to predict outcome of treatment of patients with an endocrine treatment. It is also particularly preferred that the expression of the gene panel consisting PITX2 and PLAU is determined in order to provide a prognosis of patients. It is preferred that said patients are analyzed prior to receiving any endocrine treatment.

[0177] Determination of expression may be achieved by any means standard in the art. However, it is most preferably achieved by analysis of LOH, methylation, protein expression, mRNA expression, genetic or other epigenetic modifications of the genomic sequences.

[0178] Especially preferred is the analysis of the DNA methylation profile of the genomic sequence of the gene PITX2 and/or regulatory or promoter regions thereof as given in SEQ ID NO:149. Further preferred is the analysis of the methylation status of CpG positions within the following sections of SEQ ID NO:149: nucleotide 2,700-nucleotide 3,000; nucleotide 3,900-nucleotide 4,200; nucleotide 5,500-nucleotide 8,000; nucleotide 13,500-nucleotide 14,500; nucleotide 16,500-nucleotide 18,000; nucleotide 18,500-nucleotide 19,000; nucleotide 21,000-nucleotide 22,500. Especially preferred is the analysis of the methylation status of eight specific CpG dinucleotides, covered in the four sub-sequences of said SEQ ID NO:149 given in SEQ ID NOS:1, 13, 18 and 19. Wherein the method comprises analysis of a gene panel comprising the PITX2 and one or more genes selected from the group consisting ABCA8, CDK6, ERBB2, ONECUT2, PLAU, TBC1D3 and TFF1 and/or regulatory or promoter regions thereof it is preferred that the sequence of said genes is selected from the group consisting of SEQ ID NOS:69 to SEQ ID NO:75, and SEQ ID NO:150 according to TABLE 1.

[0179] This methodology presents further improvements over the state of the art in that the method may be applied to any subject, independent of the estrogen and/or progesterone receptor status. Therefore in a preferred embodiment, the subject is not required to have been tested for estrogen or progesterone receptor status.

[0180] In further aspects of the invention, the disclosed matter provides novel nucleic acid sequences useful for the analysis of methylation within said gene, other aspects provide novel uses of the gene and the gene product as well as methods, assays and kits directed to providing a prognosis and/or predicting outcome of endocrine treatment of a patient diagnosed with breast cell proliferative disease.

[0181] In one embodiment the invention discloses a method for providing the prognosis and/or predicting outcome of endocrine treatment of a patient suffering from a breast cell proliferative disease, by analysis of expression of the gene PITX2 and/or regulatory regions thereof. Preferably said endocrine treatment is an adjuvant endocrine monotherapy. Said method may be enabled by means of any analysis of the expression of the gene, including but not limited to mRNA expression analysis or protein expression analysis or by analysis of its genetic modifications leading to an altered expression (including LOH). However, in the most preferred embodiment of the invention, said expression is determined by means of analysis of the methylation status of CpG sites within the gene PITX2 and its promoter or regulatory elements.

[0182] In one embodiment of the method aberrant expression of the gene PITX2 and/or panels thereof may be detected by analysis of loss of heterozygosity of the gene.

[0183] In a first step genomic DNA is isolated from a biological sample of the patient's tumor. The isolated DNA is then analyzed for LOH by any means standard in the art including but not limited to amplification of the gene locus or associated microsatellite markers. Said amplification may be carried out by any means standard in the art including polymerase chain reaction (PCR), strand displacement amplification (SDA) and isothermal amplification.

[0184] The level of amplificate is then detected by any means known in the art including but not limited to gel electrophoresis and detection by probes (including Real Time PCR). Furthermore the amplificates may be labeled in order to aid said detection. Suitable detectable labels include but are not limited to fluorescence label, radioactive labels and mass labels the suitable use of which shall be described herein.

[0185] The detection of a decreased amount of an amplificate corresponding to one of the amplified alleles in a test sample as relative to that of a heterozygous control sample is indicative of LOH.

[0186] To detect the levels of mRNA encoding PITX2 and/or panels comprising said gene in a detection system for breast cancer relapse, a sample is obtained from a patient. Said obtaining of a sample is preferably not meant to be retrieving of a sample, as in performing a biopsy, but rather directed to the availability of an isolated biological material representing a specific tissue, relevant for the intended use. The sample can be a tumor tissue sample from the surgically removed tumor, a biopsy sample as taken by a surgeon and provided to the analyst or a sample of blood, plasma, serum or the like. The sample may be treated to extract the nucleic acids contained therein. The resulting nucleic acid from the sample is subjected to gel electrophoresis or other separation techniques. Detection involves contacting the nucleic acids and in particular the mRNA of the sample with a DNA sequence serving as a probe to form hybrid duplexes. The stringency of hybridization is determined by a number of factors during hybridization and during the washing procedure, including temperature, ionic strength, length of time and concentration of formamide. These factors are outlined in, for example, Sambrook et al. (Molecular Cloning: A Laboratory Manual, 2nd ed., 1989). Detection of the resulting duplex is usually accomplished by the use of labeled probes. Alternatively, the probe may be unlabeled, but may be detectable by specific binding with a ligand which is labeled, either directly or indirectly. Suitable labels and methods for labeling probes and ligands are known in the art, and include, for example, radioactive labels which may be incorporated by known methods (e.g., nick translation or kinasing), biotin, fluorescent groups, chemiluminescent groups (e.g., dioxetanes, particularly triggered dioxetanes), enzymes, antibodies, and the like.

[0187] To increase the sensitivity of the detection in a sample of mRNA encoding PITX2 and/or panels comprising said gene, the technique of reverse transcription/polymerization chain reaction can be used to amplify cDNA transcribed from mRNA encoding PITX2 and/or panels comprising said gene. The method of reverse transcription/PCR is well known in the art (e.g., see Watson and Fleming, supra).

[0188] The reverse transcription/PCR method can be performed as follows: Total cellular RNA is isolated by, for example, the standard guanidium isothiocyanate method and the total RNA is reverse transcribed. The reverse transcription method involves synthesis of DNA on a template of RNA using a reverse transcriptase enzyme and a 3′ end primer. Typically, the primer contains an oligo(dT) sequence. The cDNA thus produced is then amplified using the PCR method and PITX2 and/or panels comprising said gene specific primers (Belyavsky et al, Nucl Acid Res 17:2919-2932, 1989; Krug and Berger, Methods in Enzymology, Academic Press, N.Y., Vol. 152, pp. 316-325, 1987, which are incorporated herein by reference in their entireties)

[0189] The present invention may also be described in certain embodiments as a ‘kit’ for use in predicting the likelihood of relapse and/or survival of a breast cancer patient before or after surgical tumor removal with or without adjuvant endocrine monotherapy state through testing of a biological sample. A representative kit may comprise one or more nucleic acid segments as described above that selectively hybridize to PITX2 mRNA and/or mRNA from genes of a panel comprising said PITX2 gene, and a container for each of the one or more nucleic acid segments. In certain embodiments the nucleic acid segments may be combined in a single tube. In further embodiments, the nucleic acid segments may also include a pair of primers for amplifying the target mRNA. Such kits may also include any buffers, solutions, solvents, enzymes, nucleotides, or other components for hybridization, amplification or detection reactions. Preferred kit components include reagents for reverse transcription-PCR, in situ hybridization, Northern analysis and/or RPA.

[0190] The present invention further provides for methods to detect the presence of the polypeptide(s) of, PITX2 and/or panels comprising said protein, in a sample obtained from a patient. It is preferred that said sequence is essentially the same as the sequence as given in FIG. 10. Any method known in the art for detecting proteins can be used. Such methods include, but are not limited to immunodiffusion, immunoelectrophoresis, immunochemical methods, binder-ligand assays, immunohistochemical techniques, agglutination and complement assays. (e.g., see Basic and Clinical Immunology, Sites and Terr, eds., Appleton & Lange, Norwalk, Conn. pp 217-262, 1991, which is incorporated herein by reference in its entirety). Preferred are binder-ligand immunoassay methods including reacting antibodies with an epitope or epitopes of PITX2 and/or panels thereof and competitively displacing a labeled PITX2 protein and/or panels thereof or derivatives thereof.

[0191] Certain embodiments of the present invention comprise the use of antibodies specific to the polypeptide encoded by the gene PITX2 and/or panels comprising said gene. Such antibodies may be useful for providing a prognosis of the likelihood of relapse and/or survival of a breast cancer patient preferably under adjuvant endocrine monotherapy by comparing a patient's levels of PITX2 marker expression and/or the expression of panels comprising PITX2 to expression of the same marker(s) in normal individuals. In certain embodiments the production of monoclonal or polyclonal antibodies can be induced by the use of the PITX2 and/or other polypeptides of the panels as antigene. Such antibodies may in turn be used to detect expressed proteins as markers for prognosis of relapse of a breast cancer patient under adjuvant endocrine monotherapy. The levels of such proteins present in the peripheral blood of a patient may be quantified by conventional methods. Antibody-protein binding may be detected and quantified by a variety of means known in the art, such as labeling with fluorescent or radioactive ligands. The invention further comprises kits for performing the abovementioned procedures, wherein such kits contain antibodies specific for the PITX2 and/or panels thereof polypeptides.

[0192] Numerous competitive and non-competitive protein binding immunoassays are well known in the art. Antibodies employed in such assays may be unlabeled, for example as used in agglutination tests, or labeled for use a wide variety of assay methods. Labels that can be used include radionuclides, enzymes, fluorescers, chemiluminescers, enzyme substrates or cofactors, enzyme inhibitors, particles, dyes and the like for use in radioimmunoassay (RIA), enzyme immunoassays, e.g., enzyme-linked immunosorbent assay (ELISA), fluorescent immunoassays and the like. Polyclonal or monoclonal antibodies to PITX2 and/or panels thereof or an epitope thereof can be made for use in immunoassays by any of a number of methods known in the art. One approach for preparing antibodies to a protein is the selection and preparation of an amino acid sequence of all or part of the protein, chemically synthesising the sequence and injecting it into an appropriate animal, usually a rabbit or a mouse (Milstein and Kohler Nature 256:495-497, 1975; Gulfre and Milstein, Methods in Enzymology: Immunochemical Techniques 73:1-46, Langone and Banatis eds., Academic Press, 1981 which are incorporated herein by reference in their entireties). Methods for preparation of PITX2 and/or panels thereof or an epitope thereof include, but are not limited to chemical synthesis, recombinant DNA techniques or isolation from biological samples.

[0193] In one aspect the invention provides significant improvements over the state of the art in that it is the first single marker that can be used to predict the likelihood of relapse or of survival of a breast cancer patient under adjuvant endocrine monotherapy.

[0194] In the most preferred embodiment of the invention the analysis of expression is carried out by means of methylation analysis. It is further preferred that the methylation state of the CpG dinucleotides within the genomic sequence according to SEQ ID NO:149 and sequences complementary thereto is analyzed. SEQ ID NO:149 discloses the gene PITX2 and its promoter and regulatory elements thereof, wherein said fragment comprises CpG dinucleotides exhibiting a prognosis and/or predicting outcome of endocrine treatment specific methylation pattern. Further preferred is the analysis of the methylation status of CpG positions within the following sections of SEQ ID NO:149: nucleotide 2,700-nucleotide 3,000; nucleotide 3,900-nucleotide 4,200; nucleotide 5,500-nucleotide 8,000; nucleotide 13,500-nucleotide 14,500; nucleotide 16,500-nucleotide 18,000; nucleotide 18,500-nucleotide 19,000; nucleotide 21,000-nucleotide 22,500. Also preferred is the analysis of the sub-sequence of the gene PITX2 as shown in SEQ ID NO:1.

[0195] Wherein the method comprises analysis of the expression of a ‘gene panel’ comprising the gene and/or regulatory or promoter regions thereof and one or more genes selected from the group consisting ABCA8, CDK6, ERBB2, ONECUT2, PLAU, TBC1D3 and TFF1 it is almost most preferred that said analysis of expression is carried out by means of methylation analysis. It is particularly preferred that the CpG methylation of the gene panels selected from the group of gene panels consisting:
[0196] PITX2, PLAU and TFF1;
[0197] PITX2 and PLAU; and
[0198] PITX2 and TFF1
   is analyzed.

[0199] It is particularly preferred that the methylation of the gene panel consisting PITX2 & TFF1 is determined in order to predict outcome of treatment of patients with an endocrine treatment. It is also particularly preferred that the methylation of the gene panel consisting PITX2 & PLAU is determined in order to provide a prognosis of patients. It is preferred that said patients are analyzed prior to receiving any endocrine treatment.

[0200] Hypermethylation of PITX2 and selected other genes as herein and/or sequences thereof are associated with poor prognosis and/or outcome of endocrine treatment of breast cell proliferative disorders, most preferably breast carcinoma.

[0201] The methylation pattern of the gene PITX2 and its promoter and regulatory elements have heretofore not been analyzed with regard to prognosis or prediction of outcome of endocrine treatment of a patient diagnosed with a breast cell proliferative disorder. Due to the degeneracy of the genetic code, the sequence as identified in SEQ ID NO:149 should be interpreted so as to include all substantially similar and equivalent sequences upstream of the promoter region of a gene which encodes a polypeptide with the biological activity of that encoded by PITX2.

[0202] Most preferably the following method is used to detect methylation within the gene PITX2 and/or regulatory or promoter regions thereof wherein said methylated nucleic acids are present in an excess of background DNA, wherein the background DNA is present in 100 to 1000 times the concentration of the DNA to be detected.

[0203] The method for the analysis of methylation comprises contacting a nucleic acid sample obtained from a subject with at least one reagent or a series of reagents, wherein said reagent or series of reagents, distinguishes between methylated and non-methylated CpG dinucleotides within the target nucleic acid.

[0204] Preferably, said method comprises the following steps: In the first step, a sample of the tissue to be analyzed is obtained. The source may be any suitable source, preferably, the source of the sample is selected from the group consisting of histological slides, biopsies, paraffin-embedded tissue, bodily fluids, plasma, serum, stool, urine, blood, nipple aspirate and combinations thereof. Preferably, the source is tumor tissue, biopsies, serum, urine, blood or nipple aspirate. The most preferred source, is the tumor sample, surgically removed from the patient or a biopsy sample of said patient.

[0205] The DNA is then isolated from the sample. Genomic DNA may be isolated by any means standard in the art, including the use of commercially available kits. Briefly, wherein the DNA of interest is encapsulated in/by a cellular membrane the biological sample must be disrupted and lysed by enzymatic, chemical or mechanical means. The DNA solution may then be cleared of proteins and other contaminants, e.g., by digestion with proteinase K. The genomic DNA is then recovered from the solution. This may be carried out by means of a variety of methods including salting out, organic extraction or binding of the DNA to a solid phase support. The choice of method will be affected by several factors including time, expense and required quantity of DNA.

[0206] The genomic DNA sample is then treated in such a manner that cytosine bases which are unmethylated at the 5′-position are converted to uracil, thymine, or another base which is dissimilar to cytosine in terms of hybridization behavior. This will be understood as “treatment” or “pre-treatment” herein.

[0207] The above described pre-treatment of genomic DNA is preferably carried out with bisulfite (hydrogen sulfite, disulfite) and subsequent alkaline hydrolysis which results in a conversion of non-methylated cytosine nucleobases to uracil or to another base which is dissimilar to cytosine in terms of base pairing behavior. Enclosing the DNA to be analyzed in an agarose matrix, thereby preventing the diffusion and renaturation of the DNA (bisulfite only reacts with single-stranded DNA), and replacing all precipitation and purification steps with fast dialysis (Olek A, et al., A modified and improved method for bisulfite based cytosine methylation analysis, Nucleic Acids Res. 24:5064-6, 1996) is one preferred example how to perform said pre-treatment. It is further preferred that the bisulfite treatment is carried out in the presence of a radical scavenger or DNA denaturing agent.

[0208] The treated DNA is then analyzed in order to determine the methylation state of the gene PITX2 and/or regulatory regions thereof (prior to the treatment) associated with prognosis and/or outcome of endocrine treatment. In a further embodiment of the method the methylation state of the gene PITX2 and/or regulatory regions thereof and the methylation state of one or more genes selected from the group consisting ABCA8, CDK6, ERBB2, ONECUT2, PLAU, TBC1D3 and TFF1 and/or regulatory or promoter regions thereof is determined. It is particularly preferred that methylation status of a gene panel selected from the group of gene panels consisting PITX2, PLAU & TFF1; PITX2 & PLAU; PITX2 & TFF1 is determined. It is further preferred that the sequences of said genes as described in the accompanying sequence listing (see TABLE 3) are analyzed

[0209] In the third step of the method, fragments of the pretreated DNA are amplified. Wherein the source of the DNA is free DNA from serum, or DNA extracted from paraffin it is particularly preferred that the size of the amplificate fragment is between 100 and 200 base pairs in length, and wherein said DNA source is extracted from cellular sources (e.g. tissues, biopsies, cell lines) it is preferred that the amplificate is between 100 and 350 base pairs in length. It is particularly preferred that said amplificates comprise at least one 20 base pair sequence comprising at least three CpG dinucleotides. Said amplification is carried out using sets of primer oligonucleotides according to the present invention, and a preferably heat-stable polymerase. The amplification of several DNA segments can be carried out simultaneously in one and the same reaction vessel, in one embodiment of the method preferably six or more fragments are amplified simultaneously. Typically, the amplification is carried out using a polymerase chain reaction (PCR). The set of primer oligonucleotides includes at least two oligonucleotides whose sequences are each reverse complementary, identical, or hybridize under stringent or highly stringent conditions to an at least 18-base-pair long segment of the base sequences of SEQ ID NOS:2-5, SEQ ID NOS:76 to SEQ ID NO:103 and SEQ ID NOS:151 to SEQ ID NO:158, and sequences complementary thereto.

[0210] In a preferred embodiment of the method the primers may be selected from the group consisting to SEQ ID NOS:6 to SEQ ID NO:10.

[0211] In an alternate embodiment of the method, the methylation status of preselected CpG positions within the nucleic acid sequences comprising SEQ ID NO:1, SEQ ID NOS:60 to SEQ ID NO:75, SEQ ID NO:149 and SEQ ID NO:150 may be detected by use of methylation-specific primer oligonucleotides. This technique (MSP) has been described in U.S. Pat. No. 6,265,171 to Herman. The use of methylation status specific primers for the amplification of bisulfite treated DNA allows the differentiation between methylated and unmethylated nucleic acids. MSP primers pairs contain at least one primer which hybridizes to a bisulfite treated CpG dinucleotide. Therefore, the sequence of said primers comprises at least one CpG, TpG or CpA dinucleotide. MSP primers specific for non-methylated DNA contain a “T” at the 3′ position of the C position in the CpG. Preferably, therefore, the base sequence of said primers is required to comprise a sequence having a length of at least 18 nucleotides which hybridizes to a pretreated nucleic acid sequence according to SEQ ID NOS:2 to SEQ ID NO:5 and SEQ ID NOS: 151, 152, 155 and 156, and sequences complementary thereto, wherein the base sequence of said oligomers comprises at least one CpG, tpG or Cpa dinucleotide. In this embodiment of the method according to the invention it is particularly preferred that the MSP primers comprise between 2 and 4 CpG, tpG or Cpa dinucleotides. It is further preferred that said dinucleotides are located within the 3′ half of the primer, e.g., wherein a primer is 18 bases in length the specified dinucleotides are located within the first 9 bases form the 3′end of the molecule. In addition to the CpG, tpG or Cpa dinucleotides it is further preferred that said primers should further comprise several bisulfite converted bases (i.e. cytosine converted to thymine, or on the hybridizing strand, guanine converted to adenosine). In a further preferred embodiment said primers are designed so as to comprise no more than 2 cytosine or guanine bases.

[0212] The fragments obtained by means of the amplification can carry a directly or indirectly detectable label. Preferred are labels in the form of fluorescence labels, radionuclides, or detachable molecule fragments having a typical mass which can be detected in a mass spectrometer. Where said labels are mass labels, it is preferred that the labeled amplificates have a single positive or negative net charge, allowing for better detectability in the mass spectrometer. The detection may be carried out and visualized by means of, e.g., matrix assisted laser desorption/ionization mass spectrometry (MALDI) or using electron spray mass spectrometry (ESI).

[0213] Matrix Assisted Laser Desorption/Ionization Mass Spectrometry (MALDI-TOF) is a very efficient development for the analysis of biomolecules (Karas & Hillenkamp, Anal Chem., 60:2299-301, 1988). An analyte is embedded in a light-absorbing matrix. The matrix is evaporated by a short laser pulse thus transporting the analyte molecule into the vapor phase in an unfragmented manner. The analyte is ionized by collisions with matrix molecules. An applied voltage accelerates the ions into a field-free flight tube. Due to their different masses, the ions are accelerated at different rates. Smaller ions reach the detector sooner than bigger ones. MALDI-TOF spectrometry is well suited to the analysis of peptides and proteins. The analysis of nucleic acids is somewhat more difficult (Gut & Beck, Current Innovations and Future Trends, 1:147-57, 1995). The sensitivity with respect to nucleic acid analysis is approximately 100-times less than for peptides, and decreases disproportionally with increasing fragment size. Moreover, for nucleic acids having a multiply negatively charged backbone, the ionisation process via the matrix is considerably less efficient. In MALDI-TOF spectrometry, the selection of the matrix plays an eminently important role. For the desorption of peptides, several very efficient matrixes have been found which produce a very fine crystallisation. There are now several responsive matrixes for DNA, however, the difference in sensitivity between peptides and nucleic acids has not been reduced. This difference in sensitivity can be reduced, however, by chemically modifying the DNA in such a manner that it becomes more similar to a peptide. For example, phosphorothioate nucleic acids, in which the usual phosphates of the backbone are substituted with thiophosphates, can be converted into a charge-neutral DNA using simple alkylation chemistry (Gut & Beck, Nucleic Acids Res. 23: 1367-73, 1995). The coupling of a charge tag to this modified DNA results in an increase in MALDI-TOF sensitivity to the same level as that found for peptides. A further advantage of charge tagging is the increased stability of the analysis against impurities, which makes the detection of unmodified substrates considerably more difficult.

[0214] In a particularly preferred embodiment of the method the amplification of step three is carried out in the presence of at least one species of blocker oligonucleotides. The use of such blocker oligonucleotides has been described by Yu et al., BioTechniques 23:714-720, 1997. The use of blocking oligonucleotides enables the improved specificity of the amplification of a subpopulation of nucleic acids. Blocking probes hybridized to a nucleic acid suppress, or hinder the polymerase mediated amplification of said nucleic acid. In one embodiment of the method blocking oligonucleotides are designed so as to hybridize to background DNA. In a further embodiment of the method said oligonucleotides are designed so as to hinder or suppress the amplification of unmethylated nucleic acids as opposed to methylated nucleic acids or vice versa.

[0215] Blocking probe oligonucleotides are hybridized to the bisulfite treated nucleic acid concurrently with the PCR primers. PCR amplification of the nucleic acid is terminated at the 5′ position of the blocking probe, such that amplification of a nucleic acid is suppressed where the complementary sequence to the blocking probe is present. The probes may be designed to hybridize to the bisulfite treated nucleic acid in a methylation status specific manner. For example, for detection of methylated nucleic acids within a population of unmethylated nucleic acids, suppression of the amplification of nucleic acids which are unmethylated at the position in question would be carried out by the use of blocking probes comprising a ‘TpG’ at the position in question, as opposed to a ‘CpG.’ In one embodiment of the method the sequence of said blocking oligonucleotides should be identical or complementary to molecule is complementary or identical to a sequence at least 18 base pairs in length selected from the group consisting of SEQ ID NOs: 2 to 5, 151, 152, 155 and 156 preferably comprising one or more CpG, TpG or CpA dinucleotides. In one embodiment of the method the sequence of said oligonucleotides is selected from the group consisting SEQ ID NO:15 and SEQ ID NO:16, and sequences complementary thereto.

[0216] For PCR methods using blocker oligonucleotides, efficient disruption of polymerase-mediated amplification requires that blocker oligonucleotides not be elongated by the polymerase. Preferably, this is achieved through the use of blockers that are 3′-deoxyoligonucleotides, or oligonucleotides derivatised at the 3′ position with other than a “free” hydroxyl group. For example, 3′-O-acetyl oligonucleotides are representative of a preferred class of blocker molecule.

[0217] Additionally, polymerase-mediated decomposition of the blocker oligonucleotides should be precluded. Preferably, such preclusion comprises either use of a polymerase lacking 5′-3′ exonuclease activity, or use of modified blocker oligonucleotides having, for example, thioate bridges at the 5′-termini thereof that render the blocker molecule nuclease-resistant. Particular applications may not require such 5′ modifications of the blocker. For example, if the blocker- and primer-binding sites overlap, thereby precluding binding of the primer (e.g., with excess blocker), degradation of the blocker oligonucleotide will be substantially precluded. This is because the polymerase will not extend the primer toward, and through (in the 5′-3′ direction) the blocker, a process that normally results in degradation of the hybridized blocker oligonucleotide.

[0218] A particularly preferred blocker/PCR embodiment, for purposes of the present invention and as implemented herein, comprises the use of peptide nucleic acid (PNA) oligomers as blocking oligonucleotides. Such PNA blocker oligomers are ideally suited, because they are neither decomposed nor extended by the polymerase.

[0219] In one embodiment of the method, the binding site of the blocking oligonucleotide is identical to, or overlaps with that of the primer and thereby hinders the hybridization of the primer to its binding site. In a further preferred embodiment of the method, two or more such blocking oligonucleotides are used. In a particularly preferred embodiment, the hybridization of one of the blocking oligonucleotides hinders the hybridization of a forward primer, and the hybridization of another of the probe (blocker) oligonucleotides hinders the hybridization of a reverse primer that binds to the amplificate product of said forward primer.

[0220] In an alternative embodiment of the method, the blocking oligonucleotide hybridizes to a location between the reverse and forward primer positions of the treated background DNA, thereby hindering the elongation of the primer oligonucleotides.

[0221] It is particularly preferred that the blocking oligonucleotides are present in at least 5 times the concentration of the primers.

[0222] In the fourth step of the method, the amplificates obtained during the third step of the method are analyzed in order to ascertain the methylation status of the CpG dinucleotides prior to the treatment.

[0223] In embodiments where the amplificates are obtained by means of MSP amplification and/or blocking oligonucleotides, the presence or absence of an amplificate is in itself indicative of the methylation state of the CpG positions covered by the primers and or blocking oligonucleotide, according to the base sequences thereof. All possible known molecular biological methods may be used for this detection, including, but not limited to gel electrophoresis, sequencing, liquid chromatography, hybridizations, real time PCR analysis or combinations thereof. This step of the method further acts as a qualitative control of the preceding steps.

[0224] In the fourth step of the method amplificates obtained by means of both standard and methylation specific PCR are further analyzed in order to determine the CpG methylation status of the genomic DNA isolated in the first step of the method. This may be carried out by means of hybridization-based methods such as, but not limited to, array technology and probe based technologies as well as by means of techniques such as sequencing and template directed extension.

[0225] In one embodiment of the method, the amplificates synthesized in step three are subsequently hybridized to an array or a set of oligonucleotides and/or PNA probes. In this context, the hybridization takes place in the following manner: the set of probes used during the hybridization is preferably composed of at least 2 oligonucleotides or PNA-oligomers; in the process, the amplificates serve as probes which hybridize to oligonucleotides previously bonded to a solid phase; the non-hybridized fragments are subsequently removed; said oligonucleotides contain at least one base sequence having a length of at least 9 nucleotides which is reverse complementary or identical to a segment of the base sequences specified in the SEQ ID NOD:2 to SEQ ID NO:5 and SEQ ID NOS:151, 152, 155 and 156 and the segment comprises at least one CpG, TpG or CpA dinucleotide. In further embodiments said oligonucleotides contain at least one base sequence having a length of at least 9 nucleotides which is reverse complementary or identical to a segment of the base sequences specified in the SEQ ID NOS:2-5, SEQ ID NOS:151 to SEQ ID NO:158 and SEQ ID NOS:76 to SEQ ID NO:103; and the segment comprises at least one CpG, TpG or CpA dinucleotide.

[0226] In a preferred embodiment, said dinucleotide is present in the central third of the oligomer. For example, wherein the oligomer comprises one CpG dinucleotide, said dinucleotide is preferably the fifth to ninth nucleotide from the 5′-end of a 13-mer. In a further embodiment one oligonucleotide exists for the analysis of each CpG dinucleotide within the sequence according to SEQ ID NO:1 and 149, and the equivalent positions within SEQ ID NOS:2 to 5 and SEQ ID NOS:151, 152, 155 and 156. One oligonucleotide exists for the analysis of each CpG dinucleotide within the sequence according to SEQ ID NO:1, SEQ ID NOS:149, 150, and SEQ ID NOS:60 to SEQ ID NO:75, and the equivalent positions within SEQ ID NOS:2-5, SEQ ID NOS:151 to SEQ ID NO:158, and SEQ ID NOS:76 to SEQ ID NO:103. Said oligonucleotides may also be present in the form of peptide nucleic acids. The non-hybridized amplificates are then removed. The hybridized amplificates are detected. In this context, it is preferred that labels attached to the amplificates are identifiable at each position of the solid phase at which an oligonucleotide sequence is located.

[0227] In yet a further embodiment of the method, the genomic methylation status of the CpG positions may be ascertained by means of oligonucleotide probes that are hybridized to the bisulfite treated DNA concurrently with the PCR amplification primers (wherein said primers may either be methylation specific or standard).

[0228] A particularly preferred embodiment of this method is the use of fluorescence-based Real Time Quantitative PCR (Heid et al., Genome Res. 6:986-994, 1996; also see U.S. Pat. No. 6,331,393). There are two preferred embodiments of utilizing this method. One embodiment, known as the TaqMan™ assay employs a dual-labeled fluorescent oligonucleotide probe. The TaqMan™ PCR reaction employs the use of a non-extendible interrogating oligonucleotide, called a TaqMan™ probe, which is designed to hybridize to a CpG-rich sequence located between the forward and reverse amplification primers. The TaqMan™ probe further comprises a fluorescent “reporter moiety” and a “quencher moiety” covalently bound to linker moieties (e.g., phosphoramidites) attached to the nucleotides of the TaqMan™ oligonucleotide. Hybridized probes are displaced and broken down by the polymerase of the amplification reaction thereby leading to an increase in fluorescence. For analysis of methylation within nucleic acids subsequent to bisulfite treatment, it is required that the probe be methylation specific, as described in U.S. Pat. No. 6,331,393, (hereby incorporated by reference in its entirety) also known as the MethyLigh™ assay. The second preferred embodiment of this MethyLight™ technology is the use of dual-probe technology (Lightcycler®), each probe carrying donor or recipient fluorescent moieties, hybridization of two probes in proximity to each other is indicated by an increase or fluorescent amplification primers. Both these techniques may be adapted in a manner suitable for use with bisulfite treated DNA, and moreover for methylation analysis within CpG dinucleotides.

[0229] Also any combination of these probes or combinations of these probes with other known probes may be used.

[0230] In a further preferred embodiment of the method, the fourth step of the method comprises the use of template-directed oligonucleotide extension, such as MS-SNuPE as described by Gonzalgo & Jones, Nucleic Acids Res. 25:2529-2531, 1997. In said embodiment it is preferred that the methylation specific single nucleotide extension primer (MS-SNuPE primer) is identical or complementary to a sequence at least nine but preferably no more than twenty five nucleotides in length of one or more of the sequences taken from the group of SEQ ID NOS:2 to SEQ ID NO:5 and SEQ ID NOS:151, 152, 155 and 156. However it is preferred to use fluorescently labeled nucleotides, instead of radiolabeled nucleotides.

[0231] In yet a further embodiment of the method, the fourth step of the method comprises sequencing and subsequent sequence analysis of the amplificate generated in the third step of the method (Sanger F., et al., Proc Natl Acad Sci USA 74:5463-5467, 1977). In the most preferred embodiment of the methylation analysis method the genomic nucleic acids are isolated and treated according to the first three steps of the method outlined above, namely:
[0232] a) obtaining, from a subject, a biological sample having subject genomic DNA;
[0233] b) extracting or otherwise isolating the genomic DNA;
[0234] c) treating the genomic DNA of b), or a fragment thereof, with one or more reagents to convert cytosine bases that are unmethylated in the 5-position thereof to uracil or to another base that is detectably dissimilar to cytosine in terms of hybridization properties; and wherein
[0235] d) amplifying subsequent to treatment in c) is carried out in a methylation specific manner, namely by use of methylation specific primers or blocking oligonucleotides, and further wherein
[0236] e) detecting of the amplificates is carried out by means of a real-time detection probe, as described above.

[0237] Preferably, where the subsequent amplification of d) is carried out by means of methylation specific primers, as described above, said methylation specific primers comprise a sequence having a length of at least 9 nucleotides which hybridizes to a treated nucleic acid sequence according to one of SEQ ID NOS:2 to SEQ ID NO:5 and SEQ ID NOS:151, 152, 155 and 156, and sequences complementary thereto, wherein the base sequence of said oligomers comprises at least one CpG dinucleotide. Additionally, further methylation specific primers may also be used for the analysis of a gene panel as described above wherein said primers comprise a sequence having a length of at least 9 nucleotides which hybridizes to a treated nucleic acid sequence according to one of SEQ ID NOS:76 to SEQ ID NO:103 and SEQ ID NOS:153, 154, 157 and 158, and sequences complementary thereto, wherein the base sequence of said oligomers comprises at least one CpG dinucleotide.

[0238] In an alternative most preferred embodiment of the method, the subsequent amplification of d) is carried out in the presence of blocking oligonucleotides, as described above. It is particularly preferred that said blocking oligonucleotides comprise a sequence having a length of at least 9 nucleotides which hybridizes to a treated nucleic acid sequence according to one of SEQ ID NOS:2 to SEQ ID NO:5 and SEQ ID NOS:151, 152, 155 and 156, and sequences complementary thereto, wherein the base sequence of said oligomers comprises at least one CpG, TpG or CpA dinucleotide.

[0239] Additionally, further blocking oligonucleotides may also be used for the analysis of a gene panel as described above wherein said blocking oligonucleotides comprising a sequence having a length of at least 9 nucleotides which hybridizes to a treated nucleic acid sequence according to one of SEQ ID NOS:76 to SEQ ID NO:103 and SEQ ID NOS:153, 154, 157 and 158, and sequences complementary thereto, wherein the base sequence of said oligomers comprises at least one CpG, TpG or CpA dinucleotide.

[0240] Step e) of the method, namely the detection of the specific amplificates indicative of the methylation status of one or more CpG positions according to SEQ ID NOS:2-5, SEQ ID NOs:151 to SEQ ID NO:158, and SEQ ID NOS:76 to SEQ ID NO:103, and most preferably SEQ ID NOS:2 to SEQ ID NO:5 and SEQ ID NOS:151, 152, 155 and 156 is carried out by means of real-time detection methods as described above.

[0241] Additional embodiments of the invention provide a method for the analysis of the methylation status of the gene PITX2 and/or regulatory regions thereof without the need for pretreatment. Furthermore said method may also be used for the methylation analysis of the gene PITX2 and/or regulatory regions thereof and the methylation state of one or more genes selected from the group consisting ABCA8, CDK6, ERBB2, ONECUT2, PLAU, TBC1D3, TFF1 and/or regulatory or promoter regions thereof is determined. It is particularly preferred that methylation status of a gene panel selected from the group of gene panels consisting PITX2, PLAU and TFF1; PITX2 and PLAU; PITX2 and TFF1 is determined.

[0242] In the first step of such additional embodiments, the genomic DNA sample is isolated from tissue or cellular sources. Preferably, such sources include cell lines, histological slides, biopsy tissue, body fluids, or breast tumor tissue embedded in paraffin. Extraction may be by means that are standard to one skilled in the art, including but not limited to the use of detergent lysates, sonification and vortexing with glass beads. Once the nucleic acids have been extracted, the genomic double-stranded DNA is used in the analysis.

[0243] In a preferred embodiment, the DNA may be cleaved prior to the treatment, and this may be by any means standard in the state of the art, but preferably with methylation-sensitive restriction endonucleases.

[0244] In the second step, the DNA is then digested with one or more methylation sensitive restriction enzymes. The digestion is carried out such that hydrolysis of the DNA at the restriction site is informative of the methylation status of a specific CpG dinucleotide.

[0245] In the third step, which is optional but a preferred embodiment, the restriction fragments are amplified. This is preferably carried out using a polymerase chain reaction, and said amplificates may carry suitable detectable labels as discussed above, namely fluorophore labels, radionuclides and mass labels.

[0246] In the fourth step the amplificates are detected. The detection may be by any means standard in the art, for example, but not limited to, gel electrophoresis analysis, hybridization analysis, incorporation of detectable tags within the PCR products, DNA array analysis, MALDI or ESI analysis.

[0247] In the final step of the method the prognosis and/or predicting outcome of endocrine treatment is determined. Preferably, the correlation of the expression level of the genes with the prognosis and/or predicting outcome of endocrine treatment is done substantially without human intervention. Poor prognosis and/or predicting outcome of endocrine treatment is determined by aberrant levels of mRNA and/or protein, and hypermethylation. It is particularly preferred that said hypermethylation is above average or above median of said disease in said specific setting.

[0248] It is particularly preferred that the classification of the sample is carried out by algorithmic means.

[0249] In one embodiment machine learning predictors are trained on the methylation patterns at the investigated CpG sites of the samples with known status. A selection of the CpG positions which are discriminative for the machine learning predictor are used in the panel. In a particularly preferred embodiment of the method, both methods are combined; that is, the machine learning classifier is trained only on the selected CpG positions that are significantly differentially methylated between the classes according to the statistical analysis.

[0250] The development of algorithmic methods for the classification of a sample based on the methylation status of the CpG positions within the panel are demonstrated in the examples.

[0251] The disclosed invention provides treated nucleic acids, derived from genomic SEQ ID NOS:1, SEQ ID NO:149, SEQ ID NO: 150 and SEQ ID NOS:60 to SEQ ID NO:75, wherein the treatment is suitable to convert at least one unmethylated cytosine base of the genomic DNA sequence to uracil or another base that is detectably dissimilar to cytosine in terms of hybridization. The genomic sequences in question may comprise one, or more, consecutive or random methylated CpG positions. Said treatment preferably comprises use of a reagent selected from the group consisting of bisulfite, hydrogen sulfite, disulfite, and combinations thereof. In a preferred embodiment of the invention, the objective comprises analysis of a non-naturally occurring modified nucleic acid comprising a sequence of at least 16 contiguous nucleotide bases in length of a sequence selected from the group consisting of SEQ ID NO: 1, SEQ ID NO:149, SEQ ID NO:150 and SEQ ID NOS:60 to SEQ ID NO:75, wherein said sequence comprises at least one CpG, TpA or CpA dinucleotide and sequences complementary thereto. The sequences of SEQ ID NOS:2-5, SEQ ID NOS:151 to SEQ ID NO:158 and SEQ ID NOS:76 to SEQ ID NO:103 provide non-naturally occurring modified versions of the nucleic acid according to SEQ ID NO:1, SEQ ID NO:149, SEQ ID NO:150 and SEQ ID NOS:60 to SEQ ID NO:75, wherein the modification of each genomic sequence results in the synthesis of a nucleic acid having a sequence that is unique and distinct from said genomic sequence as follows. For each sense strand genomic DNA, e.g., SEQ ID NO: 1, four converted versions are disclosed. A first version wherein “C” to “T,” but “CpG” remains “CpG” (i.e., corresponds to case where, for the genomic sequence, all “C” residues of CpG dinucleotide sequences are methylated and are thus not converted); a second version discloses the complement of the disclosed genomic DNA sequence (i.e. antisense strand), wherein “C” to “T,” but “CpG” remains “CpG” (i.e., corresponds to case where, for all “C” residues of CpG dinucleotide sequences are methylated and are thus not converted). The ‘upmethylated’ converted sequences of SEQ ID NO:1, SEQ ID NO:149, SEQ ID NO:150 and SEQ ID NOS:60 to SEQ ID NO:75 correspond to SEQ ID NOS:2-5, SEQ ID NOS:151 to SEQ ID NO:158 and SEQ ID NOS:76 to SEQ ID NO:103. A third chemically converted version of each genomic sequences is provided, wherein “C” to “T” for all “C” residues, including those of “CpG” dinucleotide sequences (i.e., corresponds to case where, for the genomic sequences, all “C” residues of CpG dinucleotide sequences are unmethylated); a final chemically converted version of each sequence, discloses the complement of the disclosed genomic DNA sequence (i.e. antisense strand), wherein “C” to “T” for all “C” residues, including those of “CpG” dinucleotide sequences (i.e., corresponds to case where, for the complement (antisense strand) of each genomic sequence, all “C” residues of CpG dinucleotide sequences are unmethylated). The ‘downmethylated’ converted sequences of SEQ ID NO:1, SEQ ID NO:149, SEQ ID NO:150 and SEQ ID NOS:60 to SEQ ID NO:75 correspond to SEQ ID NOS:2-5, SEQ ID NOS: 51 to SEQ ID NO:158 and SEQ ID NOS:76 to SEQ ID NO:103.

[0252] The invention further discloses oligonucleotide or oligomer for detecting the cytosine methylation state within genomic or pre-treated DNA, according to SEQ ID NO:1, SEQ ID NOS:149 to SEQ ID NO:158 and SEQ ID NOS:60 to SEQ ID NO:103. Said oligonucleotide or oligomer comprising a nucleic acid sequence having a length of at least nine (9) nucleotides which hybridizes, under moderately stringent or stringent conditions (as defined herein above), to a treated nucleic acid sequence according to SEQ ID NOS:2-5, SEQ ID NOS:151 to SEQ ID NO:158 and SEQ ID NOS:76 to SEQ ID NO:103 and/or sequences complementary thereto, or to a genomic sequence according to SEQ ID NO:1, SEQ ID NO:149, SEQ ID NO:150 and SEQ ID NOS:60 to SEQ ID NO:75, and/or sequences complementary thereto.

[0253] Thus, the present invention includes nucleic acid molecules (e.g., oligonucleotides and peptide nucleic acid (PNA) molecules (PNA-oligomers)) that hybridize under moderately stringent and/or stringent hybridization conditions to all or a portion of the sequences SEQ ID NOS:2-5, SEQ ID NOS:151 to SEQ ID NO:158 and SEQ ID NOS:76 to SEQ ID NO:103, or to the complements thereof. The hybridizing portion of the hybridizing nucleic acids is typically at least 9, 15, 20, 25, 30 or 35 nucleotides in length. However, longer molecules have inventive utility, and are thus within the scope of the present invention.

[0254] Preferably, the hybridizing portion of the inventive hybridizing nucleic acids is at least 95%, or at least 98%, or 100% identical to the sequence, or to a portion thereof of SEQ ID NOS:2-5, SEQ ID NOS:151 to SEQ ID NO:158 and SEQ ID NOS:76 to SEQ ID NO:103, or to the complements thereof.

[0255] Hybridizing nucleic acids of the type described herein can be used, for example, as a primer (e.g., a PCR primer), or a diagnostic and/or prognostic probe or primer. Preferably, hybridization of the oligonucleotide probe to a nucleic acid sample is performed under stringent conditions and the probe is 100% identical to the target sequence. Nucleic acid duplex or hybrid stability is expressed as the melting temperature or Tm, which is the temperature at which a probe dissociates from a target DNA. This melting temperature is used to define the required stringency conditions.

[0256] For target sequences that are related and substantially identical to the corresponding sequence of SEQ ID NO:1, SEQ ID NO:149, SEQ ID NO:150 and SEQ ID NOS:60 to SEQ ID NO:75 (such as allelic variants and SNPs), rather than identical, it is useful to first establish the lowest temperature at which only homologous hybridization occurs with a particular concentration of salt (e.g., SSC or SSPE). Then, assuming that 1% mismatching results in a 1° C. decrease in the Tm, the temperature of the final wash in the hybridisation reaction is reduced accordingly (for example, if sequences having >95% identity with the probe are sought, the final wash temperature is decreased by 5° C.). In practice, the change in Tm can be between 0.5° C. and 1.5° C. per 1% mismatch.

[0257] Examples of inventive oligonucleotides of length X (in nucleotides), as indicated by polynucleotide positions with reference to, e.g., SEQ ID NO:1, include those corresponding to sets (sense and antisense sets) of consecutively overlapping oligonucleotides of length X, where the oligonucleotides within each consecutively overlapping set (corresponding to a given X value) are defined as the finite set of Z oligonucleotides from nucleotide positions:
[0258] n to (n+(X−1));
[0259] where n=1, 2, 3, . . . (Y−(X−1));
[0260] where Y equals the length (nucleotides or base pairs) of SEQ ID NO: 1 (9001);
[0261] where X equals the common length (in nucleotides) of each oligonucleotide in the set (e.g., X=20 for a set of consecutively overlapping 20-mers); and
[0262] where the number (Z) of consecutively overlapping oligomers of length X for a given SEQ ID NO of length Y is equal to Y−(X−1). For example Z=9001−19=8,982 for either sense or antisense sets of SEQ ID NO:1, where X=20.

[0263] Preferably, the set is limited to those oligomers that comprise at least one CpG; TpG or CpA dinucleotide.

[0264] Examples of inventive 20-mer oligonucleotides include the following set of oligomers (and the antisense set complementary thereto), indicated by polynucleotide positions with reference to SEQ ID NO:1: 1-20, 2-21, 3-22, 4-23, 5-24, . . . and 8,982-9,001.

[0265] Preferably, the set is limited to those oligomers that comprise at least one CpG, TpG or CpA dinucleotide.

[0266] Likewise, examples of inventive 25-mer oligonucleotides include the following set of oligomers (and the antisense set complementary thereto), indicated by polynucleotide positions with reference to SEQ ID NO:1: 1-25, 2-26, 3-27, 4-28, 5-29, . . . and 8,977-9,001.

[0267] Preferably, the set is limited to those oligomers that comprise at least one CpG, TpG or CpA dinucleotide.

[0268] The present invention encompasses, for each of SEQ ID NOS:1-5, SEQ ID NOS:149 to SEQ ID NO:158 and SEQ ID NOS:60 to SEQ ID NO:103 (sense and antisense), multiple consecutively overlapping sets of oligonucleotides or modified oligonucleotides of length X, where, e.g., X=9, 10, 17, 20, 22, 23, 25, 27, 30 or 35 nucleotides.

[0269] The oligonucleotides or oligomers according to the present invention constitute effective tools useful to ascertain genetic and epigenetic parameters of the genomic sequence corresponding to SEQ ID NO:1, SEQ ID NO:149, SEQ ID NO:150 and SEQ ID NOS:60 to SEQ ID NO:75. Preferred sets of such oligonucleotides or modified oligonucleotides of length X are those consecutively overlapping sets of oligomers corresponding to SEQ ID NOS:1-5, SEQ ID NOS:149 to SEQ ID NO:158 and SEQ ID NOS:60 to SEQ ID NO:103 (and to the complements thereof). Preferably, said oligomers comprise at least one CpG, TpG or CpA dinucleotide.

[0270] Particularly preferred oligonucleotides or oligomers according to the present invention are those in which the cytosine of the CpG dinucleotide (or of the corresponding converted TpG or CpA dinculeotide) sequences is within the middle third of the oligonucleotide; that is, where the oligonucleotide is, for example, 13 bases in length, the CpG, TpG or CpA dinucleotide is positioned within the fifth to ninth nucleotide from the 5′-end.

[0271] The oligonucleotides of the invention can also be modified by chemically linking the oligonucleotide to one or more moieties or conjugates to enhance the activity, stability or detection of the oligonucleotide. Such moieties or conjugates include chromophores, fluorophores, lipids such as cholesterol, cholic acid, thioether, aliphatic chains, phospholipids, polyamines, polyethylene glycol (PEG), palmityl moieties, and others as disclosed in, for example, U.S. Pat. Nos. 5,514,758, 5,574,142, 5,585,481, 5,587,371, 5,597,696 and 5,958,773. The probes may also exist in the form of a PNA (peptide nucleic acid) which has particularly preferred pairing properties. Thus, the oligonucleotide may include other appended groups such as peptides, and may include hybridization-triggered cleavage agents (Krol et al., BioTechniques 6:958-976, 1988) or intercalating agents (Zon, Pharm. Res. 5:539-549, 1988). To this end, the oligonucleotide may be conjugated to another molecule, e.g., a chromophore, fluorophor, peptide, hybridization-triggered cross-linking agent, transport agent, hybridisation-triggered cleavage agent, etc.

[0272] The oligonucleotide may also comprise at least one art-recognized modified sugar and/or base moiety, or may comprise a modified backbone or non-natural internucleoside linkage.

[0273] The oligonucleotides or oligomers according to particular embodiments of the present invention are typically used in ‘sets,’ which contain at least one oligomer for analysis of each of the CpG dinucleotides of genomic sequences SEQ ID NO:1, SEQ ID NO:149, SEQ ID NO:150 and SEQ ID NOS:60 to SEQ ID NO:75, and sequences complementary thereto, or to the corresponding CpG, TpG or CpA dinucleotide within a sequence of the treated nucleic acids according to SEQ ID NOS:2-5, SEQ ID NOS:151 to SEQ ID NOS:158 and SEQ ID NOS:76 to SEQ ID NO:103, and sequences complementary thereto. However, it is anticipated that for economic or other factors it may be preferable to analyze a limited selection of the CpG dinucleotides within said sequences, and the content of the set of oligonucleotides is altered accordingly.

[0274] Therefore, in particular embodiments, the present invention provides a set of at least two (2) (oligonucleotides and/or PNA-oligomers) useful for detecting the cytosine methylation state of treated genomic DNA (SEQ ID NOS:2-5, SEQ ID NOS:151 to SEQ ID NO:158 and SEQ ID NOS:76 to SEQ ID NO:103), or in genomic DNA (SEQ ID NO:1, SEQ ID NO:149, SEQ ID NO:150 and SEQ ID NOS:60 to SEQ ID NO:75, and sequences complementary thereto). hese probes enable diagnosis, and/or classification of genetic and epigenetic parameters of lung cell proliferative disorders. The set of oligomers may also be used for detecting single nucleotide polymorphisms (SNPs) in treated genomic DNA (SEQ ID NOS:2-5, SEQ ID NOS:151 to SEQ ID NO:158 and SEQ ID NOS:76 to SEQ ID NO:103), or in genomic DNA (SEQ ID NO:1, SEQ ID NO:149, SEQ ID NO:150 and SEQ ID NOS:60 to SEQ ID NO:75, and sequences complementary thereto).

[0275] In preferred embodiments, at least one, and more preferably all members of a set of oligonucleotides is bound to a solid phase.

[0276] In further embodiments, the present invention provides a set of at least two (2) oligonucleotides that are used as ‘primer’ oligonucleotides for amplifying DNA sequences of one of SEQ ID NOS:2-5, SEQ ID NOS:151 to SEQ ID NO:158 and SEQ ID NOS:76 to SEQ ID NO:103 and sequences complementary thereto, or segments thereof.

[0277] It is anticipated that the oligonucleotides may constitute all or part of an “array” or “DNA chip” (i.e., an arrangement of different oligonucleotides and/or PNA-oligomers bound to a solid phase). Such an array of different oligonucleotide- and/or PNA-oligomer sequences can be characterized, for example, in that it is arranged on the solid phase in the form of a rectangular or hexagonal lattice. The solid-phase surface may be composed of silicon, glass, polystyrene, aluminium, steel, iron, copper, nickel, silver, or gold. Nitrocellulose as well as plastics such as nylon, which can exist in the form of pellets or also as resin matrices, may also be used. An overview of the prior art in oligomer array manufacturing can be gathered from a special edition of Nature Genetics (Nature Genetics Supplement, Volume 21, January 1999, and from the literature cited therein). Fluorescently labeled probes are often used for the scanning of immobilized DNA arrays. The simple attachment of Cy3 and Cy5 dyes to the 5′-OH of the specific probe are particularly suitable for fluorescence labels. The detection of the fluorescence of the hybridized probes may be carried out, for example, via a confocal microscope. Cy3 and Cy5 dyes, besides many others, are commercially available.

[0278] It is also anticipated that the oligonucleotides, or particular sequences thereof, may constitute all or part of an “virtual array” wherein the oligonucleotides, or particular sequences thereof, are used, for example, as ‘specifiers’ as part of, or in combination with a diverse population of unique labeled probes to analyze a complex mixture of analytes. Such a method, for example is described in U.S. 2003/0013091 (U.S. Ser. No. 09/898,743, published 16 Jan. 2003). n such methods, enough labels are generated so that each nucleic acid in the complex mixture (i.e., each analyte) can be uniquely bound by a unique label and thus detected (each label is directly counted, resulting in a digital read-out of each molecular species in the mixture).

[0279] The described invention further provides a composition of matter useful for providing a prognosis and/or prediction of outcome of endocrine treatment of breast cancer patients.

[0280] Said composition comprising at least one nucleic acid 18 base pairs in length of a segment of the nucleic acid sequence disclosed in SEQ ID NOS:2 to 5 and SEQ ID NOS:151, 152, 155 and 156, and one or more substances taken from the group comprising: magnesium chloride, dNTP, taq polymerase, bovine serum albumen, an oligomer in particular an oligonucleotide or peptide nucleic acid (PNA)-oligomer, said oligomer comprising in each case at least one base sequence having a length of at least 9 nucleotides which is complementary to, or hybridizes under moderately stringent or stringent conditions to a pretreated genomic DNA according to one of the SEQ ID NOS:2 to SEQ ID NO:5 and SEQ ID NOS:151, 152, 155 and 15, and sequences complementary thereto. It is preferred that said composition of matter comprises a buffer solution appropriate for the stabilization of said nucleic acid in an aqueous solution and enabling polymerase based reactions within said solution. Suitable buffers are known in the art and commercially available.

[0281] Moreover, an additional aspect of the present invention is a kit comprising, for example: a bisulfite-containing reagent as well as at least one oligonucleotide whose sequences in each case correspond, are complementary, or hybridize under stringent or highly stringent conditions to a 18-base long segment of the sequences SEQ ID NOS:2 to 5 and SEQ ID NOS:151, 152, 155 and 156. Said kit may further comprise at least one oligonucleotide whose sequences in each case correspond, are complementary, or hybridize under stringent or highly stringent conditions to a 18-base long segment of the sequences SEQ ID NOS:2-5, SEQ ID NOS:151-158 and SEQ ID NOS:76 to 103. Said kit may further comprise instructions for carrying out and evaluating the described method. In a further preferred embodiment, said kit may further comprise standard reagents for performing a CpG position-specific methylation analysis, wherein said analysis comprises one or more of the following techniques: MS-SNuPE, MSP, MethyLight®, HeavyMethyl®, COBRA, and nucleic acid sequencing. However, a kit along the lines of the present invention can also contain only part of the aforementioned components.

[0282] Typical reagents (e.g., as might be found in a typical COBRA-based kit) for COBRA analysis may include, but are not limited to: PCR primers for specific gene (or methylation-altered DNA sequence or CpG island); restriction enzyme and appropriate buffer; gene-hybridization oligo; control hybridization oligo; kinase labeling kit for oligonucleotide probe; and radioactive nucleotides. Additionally, bisulfite conversion reagents may include: DNA denaturation buffer; sulfonation buffer; DNA recovery reagents or kits (e.g., precipitation, ultrafiltration, affinity column); desulfonation buffer; and DNA recovery components.

[0283] Typical reagents (e.g., as might be found in a typical MethyLight™-based kit) for MethyLight™ analysis may include, but are not limited to: PCR primers for specific gene (or methylation-altered DNA sequence or CpG island); TaqMan® probes; optimized PCR buffers and deoxynucleotides; and Taq polymerase.

[0284] Typical reagents (e.g., as might be found in a typical Ms-SNuPE-based kit) for Ms-SNuPE analysis may include, but are not limited to: PCR primers for specific gene (or methylation-altered DNA sequence or CpG island); optimized PCR buffers and deoxynucleotides; gel extraction kit; positive control primers; Ms-SNuPE primers for specific gene; reaction buffer (for the Ms-SNuPE reaction); and radioactive nucleotides. Additionally, bisulfite conversion reagents may include: DNA denaturation buffer; sulfonation buffer; DNA recovery regents or kit (e.g., precipitation, ultrafiltration, affinity column); desulfonation buffer; and DNA recovery components.

[0285] Typical reagents (e.g., as might be found in a typical MSP-based kit) for MSP analysis may include, but are not limited to: methylated and unmethylated PCR primers for specific gene (or methylation-altered DNA sequence or CpG island), optimized PCR buffers and deoxynucleotides, and specific probes.

[0286] While the present invention has been described with specificity in accordance with certain of its preferred embodiments, the following examples and figures serve only to illustrate the invention and is not intended to limit the invention within the principles and scope of the broadest interpretations and equivalent configurations thereof.

Exemplary SEQ ID NOS:

[0287] SEQ ID NOS:6 to 9 provide the nucleic acid sequences of exemplary primers and probes useful to predict the survival of breast cancer patients according to the invention aspect as described in EXAMPLE 4.

[0288] SEQ ID NOS:10 to 12 provide the nucleic acid sequences of exemplary primers and probes according to a control gene used in the EXAMPLES 4 and 5.

[0289] SEQ ID NO:13 provides a sub-sequence of SEQ ID NO:1, which represents the nucleic acid sequence of the human gene PITX2.

[0290] SEQ ID NOS:14 to 17 provide the nucleic acid sequences of those exemplary primers and probes useful to predict the survival of breast cancer patients according to the invention aspects as described in EXAMPLE 5.

[0291] SEQ ID NO:21 provides an amino acid sequence of the polypeptide encoded by the gene PITX2. The amino acid sequence of the polypeptide encoded by the gene PITX2 is also illustrated in FIG. 10.

TABLE 1
Genomic sequences and treated variants thereof according to the invention

| | | Sense | Antisense | Sense un- | Antisense |
|---|---|---|---|---|---|
| | | methylated | methylated | methylated | unmethylated |
| Gene | Genomic | converted | converted | converted | converted |
| name | SEQ ID NO: | SEQ ID NO: | SEQ ID NO: | SEQ ID NO: | SEQ ID NO: |
| PITX2 | 1 | 2 | 3 | 4 | 5 |
| PITX2 | 13 | | | | |
| PITX2 | 18 | | | | |
| PITX2 | 19 | | | | |
| ABCA8 | 69 | 76 | 77 | 90 | 91 |
| CDK6 | 70 | 78 | 79 | 92 | 93 |
| ERBB2 | 71 | 80 | 81 | 94 | 95 |
| ONECUT | 72 | 82 | 83 | 96 | 97 |
| PLAU | 73 | 84 | 85 | 98 | 99 |
| TBC1D3 | 74 | 86 | 87 | 100 | 101 |
| TFF1 | 75 | 88 | 89 | 102 | 103 |
| PITX2 | 149 | 151 | 152 | 155 | 156 |
| TFF1 | 150 | 153 | 154 | 157 | 158 |

### EXAMPLES

### Example 1

[0292] Study 1. The first study was based on a population of 109 patients, comprising patients of both nodal statuses N0 and N+. All patients were ER+ (estrogen receptor positive). All patients received Tamoxifen monotherapy immediately after surgery or diagnosis. The samples were analyzed using the applicant's chip technology with two chip panels representing 117 candidate genes. For further details see examples in the published patent applications WO 04/035803 and EP 03 090 432.0, which are hereby incorporated by reference. In this study one of the most significant marker gene was PITX2. The methylation status of PITX2, coding for a transcription factor, was statistically significantly correlated with disease-free survival of patients undergoing adjuvant Tamoxifen treatment. This was calculated using the Cox regression model taking into account the nodal status of the patient at the time of diagnosis.

[0293] Results. The result from this study, with respect to PITX2, is illustrated in FIG. 4. The X axis shows the metastasis free survival times of the patients in years, and the Y axis shows the proportion of metastasis free survival patients in %. Amongst the 54 patients (upper line) with below median methylation levels have a significantly longer metastasis free survival time than the 55 patients with above median methylation levels (lower line). To illustrate the result, at 10 years after surgery combined with Tamoxifen monotherapy, more than 75% of the patients with below median methylation in PITX2 were still metastasis free, as compared to less than 60% of the patients with above median methylation in PITX2.

[0294] As the survival of a breast cancer patient is known to also be correlated to the patient's nodal status, the differentiating power of the marker in this mixed population is expected to be less than in a homogenous population.

[0295] Another study was performed to analyze whether the same marker can be identified independently, in a completely different set of patient samples and also to characterize the differential power towards predicting survival for a sub-group of patients, all being N0.

### Example 2

[0296] Study 2. The second study was based on samples from 236 patients from 5 different sample providers, wherein all patients were N0 (nodal status negative), and older than 35 years. In all cases surgery was performed before 1998. All patients were ER+ (estrogen receptor positive), and the tumors were graded to be T1-3, G1-3. In this study all patients received Tamoxifen directly after surgery, and the outcome was assessed according to the length of disease-free survival. In order to be as representative as possible for the final target group, the patients and their tumor samples had to fulfil the following criteria:

[0297] The range and median follow-up of patients were the following:
[0298] Median: 64.5 months
[0299] Range: 3 months to 142 months
   (calculated based on patients who were disease-free at end of observation time).

[0300] Analysis of the methylation patterns of patient samples treated with Tamoxifen as an adjuvant therapy immediately following surgery (see FIG. 1) is shown in the plots according to FIGS. 5 to 7. For the amplificate, the mean methylation over 4 oligo-pairs for that amplificate was calculated and the population split into groups according to their mean methylation values, wherein one group was composed of individuals with a methylation score higher than the median and a second group composed of individuals with a methylation score lower than the median.

[0301] The primer oligonucleotides used to generate the amplificate, that was analyzed in the array experiment were:

| | | |
|---|---|---|
| Array Primer | | |
| PITX2_Q21: | GTAGGGGAGGGAAGTAGATGT | (SEQ ID NO:22) |
| Array Primer | | |
| PITX2_R23: | TCCTCAACTCTACAAACCTAAAA | (SEQ ID NO:23) |

The corresponding genomic region of said amplificate is given in SEQ ID NO:13.

[0302] The sequences of the oligonucleotides used in this array experiment were the following:

| | |
|---|---|
| SEQ ID NO xx: | AGTCGGGAGAGCGAAA |
| SEQ ID NO xx: | AGTTGGGAGAGTGAAA |
| SEQ ID NO xx: | AAGAGTCGGGAGTCGGA |
| SEQ ID NO xx: | AAGAGTTGGGAGTTGGA |
| SEQ ID NO xx: | GGTCGAAGAGTCGGGA |
| SEQ ID NO xx: | GGTTGAAGAGTTGGGA |
| SEQ ID NO xx: | ATGTTAGCGGGTCGAA |
| SEQ ID NO xx: | TAGTGGGTTGAAGAGT |

[0303] When the data derived from analyzing 6 different CpG sites, located within the preferred amplified region of the PITX2 gene by means of methylation specific detection oligonucleotide hybridization analysis were plotted as Kaplan-Meier estimated metastasis-free survival curves, it can be seen that the differential power of the marker PITX2 increased with selecting for N0 patients. This is shown in FIGS. 5 to 7. The X axis shows the metastasis free survival times of the patients in years, and the Y axis shows the proportion of metastasis free survival patients in %. The lower curve shows the proportion of metastasis free patients in the population with above median methylation levels, and the upper curve shows the proportion of metastasis free patients in the population with below median methylation levels.

[0304] For example, as illustrated in FIG. 5, 10 years after surgery only about 65% of the patients of the 118 patients with the higher methylation status are metastasis free, whereas about 90% of the 118 patients with lower methylation status are metastasis free.

[0305] As illustrated in FIG. 6 the analogous Kaplan-Meier analysis for a sub-population of 148 patients, characterized by a tumor at stage G1 or G2 this differential power increases again: 10 years after surgery only about 60% of the 74 patients with the higher methylation status are metastasis free, whereas about 95% of the 74 patients with lower methylation status are metastasis free.

[0306] FIG. 7 illustrates how the survival is also correlated to the tumor stage at surgery by showing the analogous Kaplan-Meier analysis for a sub-population of 150 patients, characterized by a tumor stage of T1 or T2: The number of patients with 10 years MFS is about 68% of patients of the 112 with the higher methylation status, whereas about 95% of the 112 patients with lower methylation status are metastasis free.

### Example 3

[0307] The accuracy of the differentiation between the different groups was further increased by combining multiple oligonucleotides from different genes. As described in the text it was recognized that adding additional informative markers to the analysis could potentially increase the prognostic power of a survival test. Therefore it was calculated how a combination of two methylation specific oligonucleotides each from the genes TBC1D3 and CDK6, and one oligonucleotide from the gene PITX2 would differentiate the groups of good or bad prognosis. The result is shown in FIG. 8 as the according Kaplan-Meier curve.

[0308] FIG. 9 shows, on top of FIG. 8, the classification of the patients from the sample set by means of the St. Gallen method (the current method of choice for estimating disease free survival), thereby showing the improved effectiveness of methylation analysis over current methods, in particular post 80 months.

### Example 4

[0309] Real time quantitative methylation analysis. Genomic DNA was analyzed using the Real Time PCR technique after bisulfite conversion. In this analysis four oligonucleotides were used in each reaction. Two non methylation specific PCR primers were used to amplify a segment of the treated genomic DNA containing a methylation variable oligonucleotide probe binding site. Two oligonucleotide probes competitively hybridize to the binding site, one specific for the methylated version of the binding site, the other specific to the unmethlyated version of the binding site. Accordingly, one of the probes comprises a CpG at the methylation variable position (i.e. anneals to methylated bisulphite treated sites) and the other comprises a TpG at said position (i.e. anneals to unmethylated bisulphite treated sites). Each species of probe is labeled with a 5′ fluorescent reporter dye and a 3′ quencher dye wherein the CpG and TpG oligonucleotides are labeled with different dyes.

[0310] The reactions are calibrated by reference to DNA standards of known methylation levels in order to quantify the levels of methylation within the sample. The DNA standards were composed of bisulfite treated phi29 amplified genomic DNA (i.e., unmethlyated), and/or phi29 amplified genomic DNA treated with Sss1 methylase enzyme (thereby methylating each CpG position in the sample), which is then treated with bisulfite solution. Seven different reference standards were used with 0%, (i.e. phi29 amplified genomic DNA only), 5%, 10%, 25%, 50%, 75% and 100% (i.e., phi29 Sss1 treated genomic only).

[0311] The amount of sample DNA amplified is quantified by reference to the gene (β-actin (ACTB)) to normalize for input DNA. For standardization the primers and the probe for analysis of the ACTB gene lack CpG dinucleotides so that amplification is possible regardless of methylation levels. As there are no methylation variable positions, only one probe oligonucleotide is required.

[0312] The following oligonucleotides were used in the reaction to amplify the control amplificate:

| | |
|---|---|
| Control Primer1: | |
| TGGTGATGGAGGAGGTTTAGTAAGT | (SEQ ID NO:10) |
| Control Primer2: | |
| AACCAATAAAACCTACTCCTCCCTTAA | (SEQ ID NO:11) |
| Control Probe: | |
| 6FAM-ACCACCACCCAACACACAATAACAAACACA- | (SEQ ID NO:12) |
| TAMRA or Dabcyl | |

[0313] The nucleic acid sequence of the gene PITX2 is given in (SEQ ID NO:1), after treatment with bisulfite two different strands are generated, and each of the strands is represented twice, once in a prior to treatment methylated version (SEQ ID NOS:2 and 3) and once in the prior to treatment unmethylated form (SEQ ID NOS:4 and 5), which are characterized as containing no cytosine bases (despite of those 5′ adjacent to a guanine and methylated before treatment).

[0314] The following primers are used to generate an amplificate within the PITX2 sequence comprising the CpG sites of interest:

[0315] Primers for PITX bisulfite amplificate length: 144 bp

| | | |
|---|---|---|
| PITX2: | GTAGGGGAGGGAAGTAGATGTT | (SEQ ID NO:6) |
| PITX2: | TTCTAATCCTCCTTTCCACAATAA | (SEQ ID NO:7) |

[0316] The genomic region according to the generated amplificate of 144 bp in length is given in SEQ ID NO:18.

[0317] Probes:

| | |
|---|---|
| PITX2cg1: | |
| FAM-AGTCGGAGTCGGGAGAGCGA-Darquencher | (SEQ ID NO:8) |

[0318] As an alternative quencher TAMRA was also used in additional experiments:

FAM-AGTCGGAGTCGGGAGAGCGA-TAMRA

| | | |
|---|---|---|
| PITX2tg1: | | |
| YAKIMA | YELLOW-AGTTGGAGTTGGGAGAGTGAAAGG | (SEQ ID NO:9) |
| | AGA Darquencher | |

[0319] In additional experiments the following was also used:

VIC- AGTTGGAGTTGGGAGAGTGAAAGGAGA-TAMRA

[0320] The extent of methylation at a specific locus was determined by the following formula:
methylation rate=100*I(CG)/(I(CG)+I(TG))
[0321] (I=Intensity of the fluorescence of CG-probe or TG-probe)
   PCR components were ordered from Eurogentec:
[0322] 3 mM MgCl2 buffer, 10× buffer, Hotstart TAQ
[0323] Program (45 cycles): 95° C., 10 min; 95° C., 15 sec; 62° C., 1 min

[0324] This assay was performed on 236 samples identical to those used in Example 2. The result is shown in FIG. 2. FIG. 2 shows the Kaplan-Meier estimated disease-free survival curves for 3 CpG positions of the PITX2 gene by means of Real-Time methylation specific probe analysis, as described above. The lower curve shows the proportion of disease free patients in the population with above median methylation levels, the upper curve shows the proportion of disease free patients in the population with below median methylation levels. The X axis shows the disease free survival times of the patients in months, and the Y-axis shows the proportion of disease free survival patients. The p-value (probability that the observed distribution occurred by chance) was calculated as 0.0031, thereby confirming the data obtained by means of array analysis.

[0325] For comparison, FIG. 3 illustrates the result from the array analysis of said gene, according to the chip hybridization experiment described in Example 2, wherein detection oligos were used (for details see EP 03 090 432.0, which is incorporated by reference). The p-value (probability that the observed distribution occurred by chance) was calculated as 0.0011.

### Example 5

[0326] Another QM assay was developed, which also performed very well. The following PITX2 specific oligonucleotides were employed to generate an amplificate of 164 bp. The oligonucleotides are specific for three co-methylated CpG positions:

[0327] Primers for PITX2 bisulfite amplificate with a length of 162 bp:

| | |
|---|---|
| PITX2: | |
| AACATCTACTTCCCTCCCCTAC | (SEQ ID NO: 14) |
| PITX2: | |
| GTTAGTAGAGATTTTATTAAATTTTATTGTAT | (SEQ ID NO: 15) |

The genomic region according to the generated amplificate of 162 bp in length is given in SEQ ID NO:19.

[0328] Probes (from ABI):

| | |
|---|---|
| PITX2-IIcgl: | |
| FAM-TTCGGTTGCGCGGT-MGBNQF | (SEQ ID NO:16) |
| PITX2-IItgl: | |
| VIC-TTTGGTTGTGTGGTTG-MGBNQF | (SEQ ID NO:17) |

[0329] The extent of methylation at a specific locus was determined by the following formula:
methylation rate=100*I(CG)/(I(CG)+I(TG))
[0330] (I=Intensity of the fluorescence of CG-probe or TG-probe)
[0331] PCR components were ordered from Eurogentec: 2.5 mM MgCl2 buffer, 10× buffer, Hotstart TAQ
[0332] Program (45 cycles): 95° C., 10 min; 95° C., 15 sec; 60° C., 1 min

### Example 6

LOH Analysis

[0333] Patient material. The material to be used in this study, consists of fresh frozen healthy breast tissue, fresh frozen breast tumor tissue from untreated breast cancer patients (follow up over >10 years) and samples from Tamoxifen treated patients (follow up over >10 years from Tamoxifen treatment). Aliquots of DNA from these micro-dissected lesions are used as the source template for PCR-based LOH (Loss of heterozygosity) analysis. All tumor samples were derived from ER+ node negative patients.

[0334] LOH analysis. DNA from all tissue samples is subjected to PCR-based LOH analysis using two 4q25-26 markers (D4S1284 and D4S406). These markers define a region on chromosome 4 comprising the gene PITX2 gene said region but being more than 8.5 kbp distant of a region previously shown to undergo LOH in breast carcinomas [Cancer Research 59, 3576-3580, Aug. 1, 1999].

DNA Extraction

[0335] Extract DNA from samples using the Wizzard Kit (Promega).

PCR Reaction

[0336] See Clin. Cancer Res., 5: 17-23, 1999 for further details.

[0337] Analyze each sample by means of single-plex PCR using the following primers:

[0338] D4S406

| | |
|---|---|
| Forward primer: | |
| GAAAGGCAGAGTCATAACAGGAAG | (SEQ ID NO:32) |
| Reverse primer: | |
| TAAGGATAGAGTGATTTCCAAGAAAG | (SEQ ID NO:33) |

[0339] PCR product size: 205 (bp)
[0340] GenBank Accession: Z16728

[0341] D4S1284

| | |
|---|---|
| Forward primer: | |
| CTTATCTGACAACAAGCGAGTATG | (SEQ ID NO: 34) |
| Reverse primer: | |
| CAATTATTGTATTGTAGCATCGGAG | (SEQ ID NO: 35) |

[0342] PCR product size: 172 (bp)
[0343] GenBank Accession: L14168
[0344] Synthesize forward primers with either a fluorescent FAM tag (D4S1284) or a fluorescent
[0345] TET tag (D4S406) at the 5′ end.
[0346] Prepare a suitable quantity of nucleotide mixture according to Table 2.
[0347] Aliquot 1 μl of each DNA sample into separate PCR tubes, add 9 μl reaction mixture according to Table 3 and thermal cycle according to the following conditions.
   Thermal Cycling Conditions:
[0348] 95° C. for 15 min; 39 cycles: 95° C. for 1 min; 55° C. for 0:45; 72° C. for 1:15; and 72° C. for 10 min

[0349] Gel electrophoresis. Horizontal ultrathin, high throughput fluorescence-based DNA fragment gel electrophoresis is the preferred technique to separate and analyze the PCR-generated alleles. Combine one microliter of amplified material with 2 μl formamide loading dye (APB) prior to electrophoresis. Add ROX 350 fluorescent size markers (0.7 μl; ABI) to amplified tumor DNA to allow sizing of alleles. Heat samples to 95° C., load on 70 μm, 5% horizontal polyacrylamide gel and electrophorese for 1 h and 15 min at 30 W in 1×TBE.

[0350] Data may be collected as commonly known in the art (see for example Clin. Cancer Res., 5: 17-23, 1999).

[0351] To determine whether allelic deletion had occurred at individual markers, calculate allelic ratios and express as a percentage of loss of intensity for the treated and untreated tumor samples compared with the corresponding normal samples (D-value) after normalization. When the allelic ratio in the tumor DNA is reduced by greater than 40% (DO.40) from that found in the normal DNA, the sample is denoted as having LOH at that locus.

TABLE 2
Nucleotide Mix

| | |
|---|---|
| 10 | μl dATP, 10 mM |
| 10 | μl dGTP, 10 mM |
| 10 | μl dTTP, 10 mM |
| 2.0 | μl dCTP, 10 mM |
| 288 | μl DEPC-treated H₂O |

[0352] TABLE 3
Reaction mixture

| | |
|---|---|
| 1.0 μl | Taq Buffer |
| 0.8 μl | Reduced nucleotide mixture |
| 0.2 μl | Forward primer, 20 μM |
| 0.2 μl | Reverse primer, 20 μM |
| 6.6 μl | DEPC treated H₂0 |
| 0.1 μl | □-32P dCTP |
| 0.1 μl | AmpliTaq Gold Polymerase |
| | Total volume = 9 μl |

### Example 7

[0353] Sequencing of gene PITX2. Sequencing of the gene PITX2 was carried out in order to confirm that co-methylation of CpG positions correlated across all exons. For bisulfite sequencing amplification primers were designed to cover 11 sequences within the gene PITX2, see FIG. 11 for further details. Sixteen samples analyzed in Example 4 were utilized for amplicon production. Each sample was treated with sodium bisulfite and sequenced. Sequence data was obtained using ABI 3700 sequencing technology. Obtained sequence traces were normalized and percentage methylation calculated using the Applicant's proprietary bisulphite sequence sequencing trace analysis program (See WO 2004/000463 for further information).

Samples

[0354] Eight samples displayed hypermethylation and eight samples displayed hypomethylation in analysis using QM assay as described in example 4.

Amplification

[0355] Fragments of interest were amplified using the following conditions

PCR Reaction solution:

| | |
|---|---|
| Taq 5 U/μl | 0.2 |
| dNTPs 25 mM each | 0.2 |
| 10× buffer | 2.5 |
| water | 10.1 |
| primer (6.25 μM) | 2 |
| DNA (1 ng/μl) | 10 |

Cycling Conditions:

[0356] 15 min 95° C.; 30 s 95° C.; 30 s 58° C.; 1:30 min 72° C. (40 cycles)

TABLE 4
Primers and Amplificates

| Forward primer | Reverse primer | Amplificate | Amplificate |
|---|---|---|---|
| SEQ ID NO: | SEQ ID NO: | SEQ ID NO: | number |
| 36 | 37 | 38 | 1 |
| 39 | 40 | 41 | 2 |
| 42 | 43 | 44 | 3 |
| 45 | 46 | 47 | 4 |
| 48 | 49 | 50 | 5 |
| 51 | 52 | 53 | 6 |
| 54 | 55 | 56 | 7 |
| 57 | 58 | 59 | 8 |
| 60 | 61 | 62 | 9 |
| 63 | 64 | 65 | 10 |
| 66 | 67 | 68 | 11 |

Sequencing

[0357] Only g-rich primers were used for sequencing with one exception: Amplificate Number 2 was sequenced using both forward and reverse primer.

ExoSAP-IT Reaction Solution:

[0358] 4 μl PCR product+2 μl ExoSAP-IT
[0359] 45 min/37° C. and 15 min/95° C.
   Cycle Sequencing:
[0360] 1 μl BigDye v.1.1
[0361] 1 μl water
[0362] 4 μl Sanger buffer
[0363] 4 μl dNTP mix (0.025 mM each)
[0364] -----
[0365] 10 μl
[0366] +
[0367] 5 μl Primer (2 pmol/μl)
[0368] +
[0369] 6 μl ExoSAP-IT product
   Cycling
[0370] 2 min 96° C., 26 cycles a (30 s/96° C., 15 s/55° C., 4 min/60° C.)
   Purification

[0371] A 96 well MultiScreen (Millipore) plate was filled with Sephadex G50 (Amersham) using an appropriate admeasure device. 300 μl water were added to each well and incubated 3 h at 4° C. Water was removed by spinning for 5 minutes at 910 g. Cycle sequencing product was loaded to the plate and purified by spinning for 5 min at 910 g. 10 μl of formamide was added to each eluate.

[0372] Results. All PCRs yielded a product. FIG. 12 provides matrices produced from bisulfite sequencing data analyzed by the applicant's proprietary software (See WO 2004/000463 for further information). Each column of the matrices of columns ‘A’ and ‘B’ represent the sequencing data for one amplificate. The amplificate number is shown to the left of the matrices. Each row of a matrix represents a single CpG site within the fragment and each column represents an individual DNA sample. The matrices in the column marked ‘A’ showed below median methylation as measured by QM assays (see example 4), the matrices in the column marked ‘B’ showed below median methylation as measured by QM assays.

[0373] The bar on the left represents a scale of the percent methylation, with the degree of methylation represented by the shade of each position within the column from black representing 100% methylation to light gray representing 0% methylation. White positions represented a measurement for which no data was available.

[0374] Bisulfite sequencing indicated differential methylation of CpG sites between the two selected classes of samples, furthermore co-methylation was observed across the gene. In particular amplificates 4 to 7 showed a high level of differential methylation between the two analyzed groups.

### Example 8

[0375] To validate the most promising marker panels from the set of ERBB2, TFF1, PLAU, PITX2, ONECUT, TBC1D3, & ABCA8 Real-Time assays were designed and optimized in order to provide assays of optimum accuracy. The assays were run on a combination of paraffin embedded tissue (hereinafter also referred to as PET) and fresh frozen tissue samples. DNA derived from PET is often of ‘lower quality’ (e.g., higher degree of DNA fragmentation and low DNA yield from samples), thus confirmation of assay results on PET demonstrates the robustness of the assay and increased utility of the marker.

[0376] Quantitative methylation assays were designed for the genes ERBB2, TFF1, PLAU, PITX2, ONECUT, TBC1D3, & ABCA8 and tested using a sample set of 415 estrogen receptor positive node negative samples untreated breast cancer patients and 541 estrogen receptor positive node negative samples Tamoxifen treated samples. Approximately 100 of these samples were previously analyzed in the microarray study.

[0377] The QM assay (=Quantitative Methylation Assay) is a Real-time PCR based method for quantitative DNA methylation detection. The assay principle is based on non-methylation specific amplification of the target region and a methylation specific detection by competitive hybridization of two different probes specific for the CG or the TG status, respectively. For the present study, TaqMan probes were used that were labeled with two different fluorescence dyes (“FAM” for CG specific probes, “VIC” for TG specific probes) and were further modified by a quencher molecule (“TAMRA” or “Minor Groove Binder/non-fluorescent quencher”).

Evaluation of the QM assay raw data is possible with two different methods:

[0378] 1. Measuring absolute fluorescence intensities (FI) in the logarithmic phase of amplification
[0379] 2. Difference in threshold cycles (Ct) of CG and TG specific probe.
   Results of this study were generated by using the Ct method.

[0380] In the following series of quantitative methylation assays the amount of sample DNA amplified is quantified by reference to the gene GSTP1 to normalize for input DNA. For standardization, the primers and the probe for analysis of the GSTP1 gene lack CpG dinucleotides so that amplification is possible regardless of methylation levels. As there are no methylation variable positions, only one probe oligonucleotide is required.

Sample Sets

ER+ N0 Untreated Population

[0381] To demonstrate that the markers identified have a strong prognostic component, ER+ N0 tumor samples from patients not treated with any adjuvant therapy were analyzed. Markers that are able to show a significant survival difference in this population are considered to be prognostic. All 508 samples of this set were obtained from an academic collaborator as cell nuclei pellets (fresh frozen samples). The sample population can be divided into two subsets: One with 415 randomly selected samples (from both censored and relapsing patients), representing a population with a natural distribution of relapses, and additional 93 samples from relapsing patients only. The latter samples were used for sensitivity/specificity analyses only.

[0382] FIG. 16 shows the disease-free survival of the randomly selected population in a Kaplan-Meier plot and FIG. 17 the distribution of follow-up times for the relapsed and censored patients in histograms. TABLE 6 lists the number of events broken down by different kinds of relapse. In summary, the survival of this population is comparable to the expected one from the literature.

ER+ N0 TAM Treated Population

[0383] One intended target population of the invention is patients with ER+ N0 tumors that are treated with hormone therapy. To check the performance of the marker candidates in this population, 589 samples from ER+ N0 tumors from patients treated with Tamoxifen were analyzed. All samples were received as Paraffin-embedded tissues (PET). Three to ten 10 μm sections were provided.

[0384] In addition, for 89 PET patient samples matching fresh frozen samples from the same tumor were included into the study as controls. As these samples were already used in phase 1, they allowed for two kinds of concordance studies:
[0385] Chip versus QM assay
[0386] Fresh frozen versus PET samples

[0387] Samples of the ER+, N0, TAM treated population were received from eight different providers. Altogether 589 samples were processed, 48 of which had to be excluded from the study due to various reasons (e.g., two samples from same tumor, samples from patients that did not fulfill inclusion criteria etc.).

[0388] FIG. 18 shows the disease-free survival of the total population in a Kaplan-Meier plot and FIG. 19 the distribution of follow-up times for the relapsed and censored patients in histograms. TABLE 5 lists the number of events broken down by different kinds of relapse. In summary, the survival of this population (82.1% after 10 years) is comparable to the expected one from the literature (79.2%).

DNA Extraction

[0389] DNA extraction from Fresh Frozen Samples. From a total of 508 fresh frozen samples available as cell nuclei pellets, genomic DNA was isolated using the QIAamp Kit (Qiagen, Hilden, Germany). The extraction was done according to the Cell Culture protocol using Proteinase K with few modifications.

[0390] DNA extraction from PET Samples. 589 provided PET samples were deparaffinated directly in the tube in which they were delivered by the providers. The tissue was then lysed and DNA extracted using the QIAGEN DNeasy Tissue kit.

Bisulfite Treatment

[0391] Bisulfite treatment was carried out based on the method disclosed by Olek et al. Nucleic Acids Res. 1996 Dec. 15; 24(24):5064-6, and optimized to the applicant's laboratory workflow.

[0392] Quantification Standards. The reactions are calibrated by reference to DNA standards of known methylation levels in order to quantify the levels of methylation within the sample. The DNA standards were composed of bisulfite treated phi29 amplified human genomic DNA (Promega) (i.e. unmethlyated), and/or phi29 amplified genomic DNA treated with Sss1 Methylase enzyme (thereby methylating each CpG position in the sample), which is then treated with bisulfite solution. Seven different reference standards were used with 0%, (i.e., phi29 amplified genomic DNA only), 5%, 10%, 25%, 50%, 75% and 100% (i.e. phi29 Sss1 treated genomic only). 2000 ng batches of human genomic DNA (Promega) were treated with bisulfite. To generate methylated MDA DNA, 13 tubes of 4.5 μg MDA-DNA (700 ng/μl) was treated with Sss1.

[0393] Control assay. The GSTP1-C3 assay design makes it suitable for quantitating DNAs from different sources, including fresh/frozen samples, remote samples such as plasma or serum, and DNA obtained from archival specimen such as paraffin embedded material. The following oligonucleotides were used in the reaction to amplify the control amplificate:

| | |
|---|---|
| Control Primer1: | |
| GGAGTGGAGGAAATTGAGAT | (SEQ ID NO:104) |
| Control Primer2: | |
| CCACACAACAAATACTCAAAAC | (SEQ ID NO: 105) |
| Control Probe: | |
| FAM-TGGGTGTTTGTAATTTTTGTTTTGTGTTA- | (SEQ ID NO:106) |
| GGTT-TAMRA | |

[0394]

| | |
|---|---|
| Cycle program (40 cycles): | 95° C., 10 min |
| | 95° C., 15 sec |
| | 58° C., 1 min |

Assay Design and Reaction Conditions
Two assays were developed for the analysis of the gene PITX2(SEQ ID NO:23)

[0395] Assay 1:

| | |
|---|---|
| Primers: | |
| GTAGGGGAGGGAAGTAGATGTT | (SEQ ID NO:107) |
| TTCTAATCCTCCTTTCCACAATAA | (SEQ ID NO:108) |
| Probes: | |
| FAM-AGTCGGAGTCGGGAGAGCGA-TAMRA | (SEQ ID NO:109) |
| VIC-AGTTGGAGTTGGGAGAGTGAAAGGAG | (SEQ ID NO:110) |
| A -TAMRA | |

[chemical structure]

[0396] Length of fragment: 143 bp

[0397] Positions of primers, probes and CpG dinucleotides ar highlighted.

[0398] PCR components (supplied by Eurogentec): 3 mM MgCl2 buffer, 10× buffer, Hotstart TAQ, 200 μM dNTP, 625 nM each primer, 200 nM each probe

| | |
|---|---|
| Cycle program (45 cycles): | 95° C., 10 min |
| | 95° C., 15 sec |
| | 62° C., 1 min |

[0399] Assay 2:

| | |
|---|---|
| Primers: | |
| AACATCTACTTCCCTCCCCTAC | (SEQ ID NO:112) |
| GTTAGTAGAGATTTTATTAAATTTTATTGTAT | (SEQ ID NO:113) |
| Probes: | |
| FAM-TTCGGTTGCGCGGT-MGBNQF | (SEQ ID NO:114) |
| VIC-TTTGGTTGTGTGGTTG- MGBNQF | (SEQ ID NO:115) |

[chemical structure]

[0400] Length of fragment: 164 bp

[0401] The positions of probes, primers and CpG positions are highlighted.

[0402] The probes cover three co-methylated CpG positions.

[0403] PCR components (supplied by Eurogentec): 2.5 mM MgCl2 buffer, 10× buffer, Hotstart TAQ, 200 μM dNTP, 625 nM each primer, 200 nM each probe

| | |
|---|---|
| Program (45 cycles): | 95° C., 10 min |
| | 95° C., 15 sec |
| | 60° C., 1 min |

[0404] The extent of methylation at a specific locus was determined by the following formulas:
[0405] Using absolute fluorescence intensity: methylation rate=100*I(CG)/(I(CG)+I(TG)) (I=Intensity of the fluorescence of CG-probe or TG-probe)
[0406] Using threshold cycle Ct: methylation rate=100*CG/(CG+TG)=100/(1+TG/CG)=100/(1+2ˆdelta(ct))
[0407] (assuming PCR efficiency E=2; delta (Ct)=Ct (methylated)−Ct (unmethylated))

[0408] Gene PLAU

| | |
|---|---|
| Primer: | |
| GTTAGGTGTATGGGAGGAAGTA | (SEQ ID NO:117) |
| TCCCTCCCCTATCTTACAA | (SEQ ID NO:118) |
| Probes: | |
| FAM-ACCCGAACCCCGCGTACTTC-TAMRA | (SEQ ID NO:119) |
| VIC-ACCCAAACCCCACATACTTCCACA-TAMRA | (SEQ ID NO:120) |

Amplicon (SEQ ID NO:121): [chemical structure]
[0409] Length of fragment: 166 bp

[0410] The positions of probes, primers and CpG positions are highlighted.

[0411] PCR components were supplied by Eurogentec: 2.5 mM MgCl2 buffer, 10× buffer, Hotstart TAQ, 200 μM dNTP, 625 nM each primer, 200 nM each probe

| | |
|---|---|
| Program (45 cycles): | 95° C., 10 min |
| | 95° C., 15 sec |
| | 60° C., 1 min |

[0412] Gene ONECUT2

| | |
|---|---|
| Primer: | |
| GTAGGAAGAGGTGTTGAGAAATTAA | (SEQ ID NO:122) |
| CCACACAAAAAATTTCTATACTCCT | (SEQ ID NO:123) |
| Probes: | |
| FAM- ACGGGTAGAGGCGCGGGT -TAMRA | (SEQ ID NO:124) |
| VIC- ATGGGTAGAGGTGTGGGTTATATTGTTTT | (SEQ ID NO:125) |
| G-TAMRA | |

[0413] [chemical structure] [0414] Length of fragment: 266 bp

[0415] The positions of probes, primers and CpG positions are highlighted.

[0416] PCR components were supplied by Eurogentec: 3 mM MgCl2 buffer, 10× buffer, Hotstart TAQ, 200 μM dNTP, 625 nM each primer, 200 nM each probe

| | |
|---|---|
| Program (45 cycles): | 95° C., 10 min |
| | 95° C., 15 sec |
| | 60° C., 1 min |

[0417] Gene ABCA8

| | |
|---|---|
| Primer: | |
| GTGAGGTATTGGATTTAGTTTATTTG | (SEQ ID NO:127) |
| CCCTAAATCTCATCCTAAAAACAC | (SEQ ID NO:128) |
| Probes: | |
| FAM- TGAGGTTTCGGTTTTTAACGGTGG | (SEQ ID NO:129) |
| -TAMRA | |
| VIC- TGAGGTTTTGGTTTTTAATGGTGGGAT | (SEQ ID NO:130) |
| -TAMRA | |

[0418] [chemical structure] [0419] Length of fragment: 168 bp

[0420] The positions of probes, primers and CpG positions are highlighted.

[0421] PCR components were supplied by Eurogentec: 3 mM MgCl2 buffer, 10× buffer, Hotstart TAQ, 200 μM dNTP, 625 nM each primer, 200 nM each probe

| | |
|---|---|
| Program (45 cycles): | 95° C., 10 min |
| | 95° C., 15 sec |
| | 62° C., 1 min |

[0422] Gene ERBB2

| | |
|---|---|
| Primer: | |
| GGAGGGGGTAGAGTTATTAGTTTT | (SEQ ID NO:134) |
| ACTCCCAACTTCACTTTCTCC | (SEQ ID NO:135) |
| Probes: | |
| FAM- TAATTTAGGCGTTTCGGCGTTAGG | (SEQ ID NO:136) |
| -TAMRA | |
| VIC- TAATTTAGGTGTTTGGTGTTAGGAGGG | (SEQ ID NO:137) |
| A -TAMRA | |

[0423] [chemical structure] [0424] Length of fragment: 144 bp

[0425] The positions of probes, primers and CpG positions are highlighted.

[0426] PCR components were supplied by Eurogentec: 2.5 mM MgCl2 buffer, 10× buffer, Hotstart TAQ, 200 μM dNTP, 625 nM each primer, 200 nM each probe

| | |
|---|---|
| Program (45 cycles): | 95° C., 10 min |
| | 95° C., 15 sec |
| | 62° C., 1 min |

[0427] Gene TFF1

| | |
|---|---|
| Primer: | |
| AGTTGGTGATGTTGATTAGAGTT | (SEQ ID NO:139) |
| CCCTCCCAATATACAAATAAAAACTA | (SEQ ID NO:140) |
| Probes: | |
| FAM- ACACCGTTCGTAAAA-MGBNFQ | (SEQ ID NO:141) |
| VIC- ACACCATTCATAAAAT-MGBNFQ | (SEQ ID NO:142) |

[0428] [chemical structure] [0429] Length of fragment: 189 bp

[0430] The positions of probes, primers and CpG positions are highlighted.

[0431] PCR components were supplied by Eurogentec: 2.5 mM MgCl2 buffer, 10× buffer, Hotstart TAQ, 200 μM dNTP, 625 nM each primer, 200 nM each probe

| | |
|---|---|
| Program (45 cycles): | 95° C., 10 min |
| | 95° C., 15 sec |
| | 60° C., 1 min |

[0432] Gene TBC1D3

| | |
|---|---|
| Primer: | |
| TTTTTAGTTGGTTTTTATTAGGGTTT | (SEQ ID NO:144) |
| CCAACATATCCACCCACTTACT | (SEQ ID NO:145) |
| Probes: | |
| FAM- TTTCGACTAATCTCCCGCCGA-TAMRA | (SEQ ID NO:146) |
| VIC- TTTCAACTAATCTCCCACCAATTTACT | (SEQ ID NO:147) |
| ATCA-TAMRA | |

[0433] [chemical structure] [0434] Length of fragment: 142 bp

[0435] The positions of probes, primers and CpG positions are highlighted.
[0436] PCR components were supplied by Eurogentec: 4.5 mM MgCl2 buffer, 10× buffer, Hotstart TAQ, 200 μM dNTP, 625 nM each primer, 200 nM each probe
[0437] Program (45 cycles): 95° C., 10 min; 95° C., 15 sec; 60° C., 1 min

[0438] Each of the designed assays was tested on the following sets of samples:
[0439] Tamoxifen treated patients who relapsed during treatment (all relapses).
[0440] Tamoxifen treated patients who relapsed during treatment with distant metastases only.
[0441] Non-Tamoxifen treated patients who relapsed during treatment (all relapses).
[0442] Non-Tamoxifen treated patients who relapsed during treatment with distant metastases only.
   Raw Data Processing

[0443] All analyses were based on CT evaluation (evaluation using fluorescence intensities are available upon request). Assuming optimal real-time PCR conditions in the exponential amplification phase, the concentration of methylated DNA (Cₘₑₜₕ) can be determined by

$${C}_{meth} = \frac{100}{1 + {2}^{( {CT}_{CG} - {CT}_{TG} )}} [ \% ] ,$$

where
[0444] CT_{CG} denotes the threshold cycle of the CG reporter (FAM channel); and
[0445] CT_{TG} denotes the threshold cycle of the TG reporter (VIC channel).

[0446] The thresholds for the cycles were determined by human experts after a visual inspection of the Amplification Plots [ABI PRISM 7900 HT Sequence Detection System User Guide]. The values for the cycles (CT_{CG} and CT_{TG}) were calculated with these thresholds by the ABI 7900 software. Whenever the amplification curve did not exceed the threshold, the value of the cycle was set to the maximum cycle (i.e., 50).

Statistical Methods

[0447] Cox Regression. The relation between disease-free survival times (DFS) (or metastasis free survival, MFS) and covariates are modeled using Cox Proportional Hazard models (Cox and Oates, 1984; Harrel, 2001). The hazard, i.e. the instantaneous risk of a relapse, is modeled as
h(t|x)=h₀(t)·exp(βx) (3)
and
h(t|x₁, . . . xₖ)=h₀(t)·exp(β₁x₁+ . . . +βₖxₖ) (4)
for univariate and multiple regression analyses, respectively, where t is the time measured in months after surgery, h₀(t) is the baseline hazard, x is the vector of covariates (e.g., measurements of the assays) and β is the vector of regression coefficients (parameters of the model). β will be estimated by maximizing the partial likelihood of the Cox proportional hazard model Likelihood ratio tests are performed to test whether methylation is related to the hazard. The difference between 2Log (Likelihood) of full model and null-model is approximately x²-distributed with k degrees of freedom under the null hypotheses β₁= . . . =βₖ=0.

[0448] The assumption of proportional hazards were checked by scaled Schoenfeld residuals (Thernau et al., 2000).

[0449] For the calculation, analysis and diagnostic of the Cox Proportional Hazard Model the R functions coxph, coxph.zph of the “survival” package were used.

Stepwise Regression Analysis

[0450] For multivariate Cox regression models a stepwise procedure (Venables et al., 1999; Harrel, 2001) was used in order to find sub-models including only relevant variables. Two effects are usually achieved by these procedures:
[0451] Variables (methylation rates) that are basically unrelated to the dependent variable (DFS/MFS) are excluded as they do not add relevant information to the model.
[0452] Out of a set of highly correlated variables, only the one with the best relation to the dependent variable is retained.
   Inclusion of both types of variables can lead to numerical instabilities and a loss of power. Moreover, the predictory performance can be low due to overfitting.

[0453] The applied algorithm aims at minimizing the Akaike information criterion (AIC) which is defined as
AIC=2□maximized log-likelihood+2□#parameters.

[0454] The AIC is related to the predictory performance of a model, smaller values promise better performance. Whereas the inclusion of additional variables always improves the model fit and thus increases the likelihood, the second term penalizes the estimation of additional parameters. The best model will present a compromise model with good fit and usually a small or moderate number of variables.

[0455] Stepwise regression calculation with AIC was done with the R function “step”.

Kaplan-Meier Survival Curves and Log-Rank Tests

[0456] Survival curves are estimated from DFS/MFS data using the Kaplan-Meier method (Kaplan and Meier, 1958). Log-rank tests were used to test for differences of two survival curves, e.g. survival in hyper- vs. hypomethylated groups. For a description of this test see (Cox and Oates, 1984).

[0457] For the Kaplan Meier Analysis the functions “survfit” and “survdiff” of the “survival” package were used.

Independence of Markers from Other Covariates

[0458] To check whether our marker panel gives additional and independent information, other relevant clinical factors were included in the cox proportional hazard model and the p-values for the weights for every factor were calculated (Wald-Test) (Thernau et al., 2000). For the analysis of additional factors in the Cox Proportional Hazard model, the R function “coxph” was used.

Correlation Analysis

[0459] Pearson and Spearman correlation coefficients are calculated to estimate the concordance between measurements (e.g., methylation in matched fresh frozen and PET samples).

Density Estimation

[0460] For numerical variables, kernel density estimation was performed with a gaussian kernel and variable bandwidth. The bandwidth is determined using Silverman's “rule-of-thumb” (Silverman, 1986). For the calculation of the densities the R function “density” was used.

Analysis of Sensitivity and Specificity

[0461] For the analysis of sensitivity and specificity of single assays and marker panels ROCs were calculated. The calculation of the ROCs was done with two methods: The first method is to calculate sensitivity and specificity for a given threshold for the time T_{Threshold}. With that threshold, true positives, false positives, true negatives and false negatives were defined and the values for sensitivity and specificity were calculated for different cutoffs of the model. Patients censored before T_{Threshold} were excluded. The ROCs were calculated for different times T_{Threshold} (3 year, 4 years, . . . , 10 years). The second method is to calculate sensitivity and specificity by using the Bayes-formula based on the Kaplan-Meier estimates (Heagerty et al., 2000) for the survival probabilities in the marker positive and marker negative groups for a given time T_{Threshold}. The ROCs were calculated for different times T_{Threshold} (3 year, 4 years, . . . 10 years).

k-Fold Crossvalidation

[0462] For the analysis of model selection and model robustness k-fold crossvalidation (Hastie et al., 2001) was used. The set of observation was split in k chunks by random. In turn, every chunk was used as a test set and the remaining k−1 chunks were used as training set. This procedure was repeated n times.

Population Charts

[0463] For the description of the relation between censoring and a covariate Population Charts (Mocks et al., 2002) were used. The baseline of the covariate was calculated including all observations with event. For a given time t, the mean (in case of real variables like age) or the fraction (in case of categorical variables) for all censored patients in the risk set at time t was calculated and added to the baseline value.

Technical Performance

Comparison of Assay Replicates

[0464] Each marker was measured in at least three replicates, variability between assay replicates was observed to be higher for PET than for fresh frozen samples.

Concordance Study Fresh Frozen Versus PET Samples

[0465] Markers analyzed in this study (Example 2) were initially identified on a chip platform (EXAMPLE 1) using fresh frozen samples. The ER+ N0 untreated population was also analyzed on fresh frozen samples in EXAMPLE 2. A concordance study should demonstrate that measured methylation ratios are comparable for fresh frozen and PET samples. For this purpose, 89 fresh frozen samples from three different providers already used in the chip study were processed again in parallel with a matching PET sample originating from the same tumor.

[0466] FIG. 15 shows such a concordance study for marker candidate PITX2 assay 1 as a scatter plot between fresh frozen and PET samples (using the QM assay). The association between the paired samples is 0.81 (Spearman's rho). This analysis is based on n=89 samples.

Results

[0467] Evaluation of Single Markers. Each of the eight established QM assays was used to measure the 508 samples from the N0, ER+ untreated patient population (random selection and additional relapses) in three replicates. After filtering of measuring points not fulfilling quality criteria and performing a Cox analyses, Kaplan-Meier survival curves and ROC curves for each single marker were generated.

[0468] Two different clinical endpoints were used for analyses:
[0469] Disease-free survival, i.e. using all kinds of relapses (distant metastasis, loco-regional relapses, relapses at contralateral breast) as event.
[0470] Metastasis-free survival, i.e. treating only distant metastasis as an event.

[0471] For analyzing the ER+, N0, TAM treated population, five marker candidates were analyzed on 541 samples from the N0, ER+ untreated patient population. Assays were measured in three replicates. Three assays that were measured on the untreated population (PITX-2, ONECUT, and ABCA8) were not measured due to the limited material that was available for the TAM treated population. These assays were rejected either because they performed bad in the untreated population (ONECUT and ABCA8) or in case of PITX2-II it performed significantly worse than the other assay of this marker (PITX2-I). After filtering of measuring points not fulfilling quality criteria Kaplan-Meier survival curves and ROC curves for each single marker were generated.

[0472] Two different clinical endpoints were used:
[0473] Disease-free survival, i.e., using all kinds of relapses (distant metastasis, locoregional relapses, relapses at contralateral breast) as event.
[0474] Metastasis-free survival, i.e. treating only distant metastasis as an event.

[0475] The Kaplan-Meier estimated disease-free survival or metastasis-free survival curves of each single assay are shown in FIGS. 14 to 39, and combinations of assays are shown in FIGS. 40 to 55. The X axis shows the disease free survival times of the patients in years, and the Y-axis shows the proportion of patients with disease free survival. The black plot shows the proportion of disease free patients in the population with above an optimized cut off point's methylation levels, the gray plot shows the proportion of disease free patients in the population with below an optimized cut off point's methylation levels.

[0476] The following p-values (probability that the observed distribution occurred by chance) were calculated when the cut off was optimized. For cut-off optimization, the quantiles of both groups were shifted between 0.2 and 0.8 and the p-value for the separation of the curves was calculated for each quantile. The quantile with the lowest p-value was then the best cutoff. Percentage values refer to the methylation ratios at the cut-off point.

### Single Gene Assays

Tamoxifen Treated

[0477] TAM treated (all relapses) ERBB2 (FIG. 14): p-value 0.089; cut off point: 1.3%
[0478] TAM treated (distant only) ERBB2 (FIG. 15): p-value 0.084; cut off point: 0.1%
[0479] TAM treated (all relapses) TFF1 (FIG. 16): p-value 0.037; cut off point: 50.9%
[0480] TAM treated (distant only) TFF1 (FIG. 17): p-value 0.029; cut off point: 52.9%
[0481] TAM treated (all relapses) PLAU (FIG. 18): p-value 0.056; cut off point: 4.8%
[0482] TAM treated (distant only) PLAU (FIG. 19): p-value 0.065; cut off point: 4.8%
[0483] TAM treated (all relapses) PITX2 (FIG. 20): p-value 0.01; cut off point: 13.1%
[0484] TAM treated (distant only) PITX2 (FIG. 21): p-value 0.0012; cut off point: 14.3%
[0485] TAM treated (all relapses) TBC1D3 (assay II) (FIG. 22): p-value 0.28; cut off point: 94.6%
[0486] TAM treated (distant only) TBC1D3 (assay II) (FIG. 23): p-value 0.078; cut off point: 97%

[0487] FIG. 62 shows the ROC plot at different times for marker model PITX2 (Assay 1) alone on ER+N0 TAM treated population. Panel A shows the plot at 60 months, panel B shows the plot at 72 months, Panel C shows the plot at 84 months, and Panel D shows the plot at 96 months. Only distant metastasis are defined as events. Sensitivity (proportion of all relapsed patients in poor prognostic group) shown on the X-axis and specificity (proportion of all relapse free patients in good prognostic group) shown on the Y-axis are calculated from KM estimates, and the estimated area under the curve (AUC) is calculated. Values for median cut off (triangle) and best cut off (diamond, 0.42 quantile) are plotted.
[0488] AUC 60 months: 0.6
[0489] AUC 72 months: 0.69
[0490] AUC 84 months: 0.69
[0491] AUC 96 months: 0.67

[0492] FIG. 63 shows the ROC plot at different times for marker model TFF1 on ER+N0 TAM treated population. Panel A shows the plot at 60 months, panel B shows the plot at 72 months, panel C shows the plot at 84 months and panel D shows the plot at 96 months. Only distant metastasis are defined as events. Sensitivity (proportion of all relapsed patients in poor prognostic group) shown on the X-axis and specificity (proportion of all relapse free patients in good prognostic group) shown on the Y-axis are calculated from KM estimates for different thresholds (=5, 6, 7, 8 years) and the estimated area under the curve (AUC) is calculated. Values for median cut off (triangle) and best cut off (diamond, 0.78 quantile) are plotted.
[0493] AUC 60 months: 0.7
[0494] AUC 72 months: 0.65
[0495] AUC 84 months: 0.61
[0496] AUC 96 months: 0.64

[0497] FIG. 64 shows the ROC plot at different times for marker model PLAU on ER+N0 TAM treated population. Panel A shows the plot at 60 months, panel B shows the plot at 72 months, panel C shows the plot at 84 months and panel D shows the plot at 96 months. Only distant metastasis are defined as events. Sensitivity (proportion of all relapsed patients in poor prognostic group) shown on the X-axis and specificity (proportion of all relapse free patients in good prognostic group) shown on the Y-axis are calculated from KM estimates for different thresholds (=5, 6, 7, 8 years), and the estimated area under the curve (AUC) is calculated. Values for median cut off (triangle) and best cut off (diamond, 0.77 quantile) are plotted.
[0498] AUC 60 months: 0.6
[0499] AUC 72 months: 0.63
[0500] AUC 84 months: 0.57
[0501] AUC 96 months: 0.6
   Non Tamoxifen Treated
[0502] Non Tamoxifen treated (all relapses) ERBB2 (FIG. 24): p-value 0.21; cut off point: 0%;
[0503] Non Tamoxifen treated (distant only) ERBB2 (FIG. 25): p-value 0.23; cut off point: 0.6%,
[0504] Non Tamoxifen treated (all relapses) TFF1 (FIG. 26): p-value 0.012; cut off point: 49.6%;
[0505] Non Tamoxifen treated (distant only) TFF1 (FIG. 27): p-value 0.016; cut off point: 45.4%;
[0506] Non Tamoxifen treated (all relapses) PLAU (FIG. 28): p-value 0.011; cut off point: 3.2%;
[0507] Non Tamoxifen treated (distant only) PLAU (FIG. 29): p-value 0.0082; cut off point: 5.5%;
[0508] Non Tamoxifen treated (all relapses) PITX2 (I) (FIG. 30): p-value 1.4e-06; cut off point: 35.4%;
[0509] Non Tamoxifen treated (distant only) PITX2 (I) (FIG. 31): p-value 1.7 e-05; cut off point: 41.2%;
[0510] Non Tamoxifen treated (all relapses) PITX2 (II) (FIG. 32): p-value 0.00026; cut off point: 56.1%;
[0511] Non Tamoxifen treated (distant only) PITX2 (II) (FIG. 33): p-value 0.0026; cut off point: 61.9%;
[0512] Non Tamoxifen treated (all relapses) ONECUT (FIG. 34): p-value 0.26; cut off point: 0%;
[0513] Non Tamoxifen treated (distant only) ONECUT (FIG. 35): p-value 0.77; cut off point: 0%;
[0514] Non Tamoxifen treated (all relapses) TBC1D3 (FIG. 36): p-value 0.004; cut off point: 98.6%;
[0515] Non Tamoxifen treated (distant only) TBC1D3 (FIG. 37): p-value 0.00022; cut off point: 98.6%;
[0516] Non Tamoxifen treated (all relapses) ABCA8 (FIG. 38): p-value 0.0065; cut off point: 60.9%;
[0517] Non Tamoxifen treated (distant only) ABCA8 (FIG. 39): p-value 0.15; cut off point: 49.2%
   Panels

[0518] Based on the results of the single marker evaluations, it was decided to build models using the marker candidates PITX2-Assay I, TFF1, and PLAU. All possible combinations of these markers were evaluated.

Tamoxifen Treated

[0519] TAM treated (all relapses) TFF1 & PLAU (FIG. 40): p-value 0.023; cut off point: 0.7 quantile;
[0520] TAM treated (distant only) TFF1 & PLAU (FIG. 41): p-value 0.00084; cut off point: 0.72 quantile;
[0521] TAM treated (all relapses) TFF1 & PLAU & PITX2 (FIG. 42): p-value 0.037; cut off point: 0.72 quantile;
[0522] TAM treated (distant only) TFF1 & PLAU & PITX2 (FIG. 43): p-value 0.0014; cut off point: 0.4 quantile;
[0523] TAM treated (all relapses) PITX2 & TFF1 (FIG. 44): p-value 0.17; cut off point: 0.78 quantile;
[0524] TAM treated (distant only) PITX2 & TFF1 (FIG. 45): p-value 0.0048; cut off point: 0.32 quantile;
[0525] TAM treated (all relapses) PITX2 & PLAU (FIG. 46): p-value 0.1; cut off point: 0.74 quantile;
[0526] TAM treated (distant only) PITX2 & PLAU (FIG. 47): p-value 0.0081; cut off point: 0.44 quantile.

[0527] FIG. 61 shows the ROC plot at different times for marker model PITX2 (Assay 1) and TFF1 on ER+N0 TAM treated population. Panel A shows the plot at 60 months, panel B shows the plot at 72 months, panel C shows the plot at 84 months and panel D shows the plot at 96 months. Only distant metastasis are defined as events. Sensitivity (proportion of all relapsed patients in poor prognostic group) shown on the X-axis and specificity (proportion of all relapse free patients in good prognostic group) shown on the Y-axis are calculated from KM estimates, and the estimated area under the curve (AUC) is calculated. Values for median cut off (triangle) and best cut off (diamond, 0.32 quantile) are plotted.
[0528] AUC 60 months: 0.62
[0529] AUC 72 months: 0.67
[0530] AUC 84 months: 0.63
[0531] AUC 96 months: 0.65
   Non Tamoxifen Treated
[0532] Non Tamoxifen treated (all relapses) TFF1 & PLAU (FIG. 48): p-value 0.0015; cut off point: 0.78 quantile;
[0533] Non Tamoxifen treated (distant only) TFF1 & PLAU (FIG. 49): p-value 0.003; cut off point: 0.8 quantile;
[0534] Non Tamoxifen treated (all relapses) TFF1 & PLAU & PITX2 (FIG. 50): p-value 8.9e-07; cut off point: 0.64 quantile;
[0535] Non Tamoxifen treated (distant only) TFF1 & PLAU & PITX2 (FIG. 51): p-value 5.4e-05; cut off point: 0.66 quantile;
[0536] Non Tamoxifen treated (all relapses) PITX2 & TFF1 (FIG. 52): p-value 1.9e-06; cut off point: 0.72 quantile;
[0537] Non Tamoxifen treated (distant only) PITX2 & TFF1 (FIG. 53): p-value 3.5e-05; cut off point: 0.76 quantile;
[0538] Non Tamoxifen treated (all relapses) PITX2 & PLAU (FIG. 54): p-value 1.1e-06; cut off point: 0.68 quantile;
[0539] Non Tamoxifen treated (distant only) PITX2 & PLAU (FIG. 55): p-value 1.5e-05; cut off point: 0.64 quantile.
   Robustness of Marker Models

[0540] To evaluate the robustness of the models, a crossvalidation was performed on model marker panel PITX2 (Assay 1) plus TFF1 and marker panel PITX2 (Assay 1) alone, with 200 replicates. The stability of the assignment of one certain patient to the bad or good outcome group is illustrated in FIG. 65, the left hand figure shows model marker panel PITX2 (Assay 1) plus TFF1 and the right hand figure shows model marker panel PITX2 (Assay 1) alone. The plot illustrates in how many crossvalidation replicates each patient get's assigned to group 1 (light gray) or group 2 (dark gray).

TABLE 4
Numbers of censored and relapsed patients in randomly selected
sample set of ER+, N0, untreated population.

| | Frequency | Percentage |
|---|---|---|
| Censored | 276 | 66.5 |
| Distant metastasis | 66 | 15.9 |
| Locoregional relapse | 49 | 11.8 |
| Contralateral breast | 24 | 5.8 |
| Sum | 415 | 100.0 |

[0541] TABLE 5
Numbers of censored and relapsed patients
in ER+, N0, TAM treated population.

| | Frequency | Percentage |
|---|---|---|
| Censored | 485 | 89.6 |
| Distant metastasis | 31 | 5.7 |
| Locoregional relapse | 20 | 3.7 |
| Contralateral breast | 5 | 0.9 |
| Sum | 541 | 100.0 |

1. A method for providing at least one of a prognosis for, and predicting the outcome of endocrine treatment of a subject with a cell proliferative disorder of the breast tissue, comprising:
a) obtaining a biological sample from a subject; and
b) determining, within the sample, expression of at least one of the PITX2 gene, and the regulatory sequences thereof; whereby at least one of a prognosis for, and predicting the outcome of endocrine treatment of the subject is, at least in part, afforded.

2. The method of claim 1, further comprising in b), determining expression of at least one of the TFF1 gene, the PLAU genes, and the regulatory sequences thereof.

3. The method of claim 1, further comprising in b), determining expression of at least one of the PLAU gene, and the regulatory sequences thereof.

4. The method of claim 1, further comprising in b), determining expression of at least one of the TFF1 gene, and the regulatory sequences thereof.

5. The method of any one of claims 1 to 4, wherein the subject is estrogen receptor positive.

6. The method of any one of claims 1 to 4, further comprising:
d) determining a suitable treatment regimen for the subject.

7. The method of claim 6, wherein the suitable treatment regimen comprises one or more therapies selected from the group consisting of chemotherapy, radiotherapy, surgery, biological therapy, immunotherapy, antibodies, molecularly targeted drugs, estrogen receptor modulators, estrogen receptor down-regulators, aromatase inhibitors, ovarian ablation, LHRH analogues and other centrally acting drugs influencing estrogen production.

8. The method of any one of claims 1 to 4, wherein the cell proliferative disorder of the breast tissue is selected from the group consisting of ductal carcinoma in situ, invasive ductal carcinoma, invasive lobular carcinoma, lobular carcinoma in situ, comedocarcinoma, inflammatory carcinoma, mucinous carcinoma, scirrhous carcinoma, colloid carcinoma, tubular carcinoma, medullary carcinoma, metaplastic carcinoma, and papillary carcinoma and papillary carcinoma in situ, undifferentiated or anaplastic carcinoma and Paget's disease of the breast, and combinations thereof.

9. The method of any one of claims 1 to 4, wherein expression is determined by analysis of at least one of mRNA expression, LOH, and protein expression.

10. The method of any one of claims 1 to 4, wherein expression is determined by analysis of the methylation status of one or more CpG positions within the genes or regulatory regions thereof.

11. A method for providing at least one of a prognosis for, and predicting the outcome of endocrine treatment of a subject with a cell proliferative disorder of the breast tissue, comprising:
a) isolating genomic DNA from a biological sample obtained from a subject;
b) treating the genomic DNA, or a fragment or portion thereof, with one or more reagents suitable to convert 5-position unmethylated cytosine bases to uracil or to another base that is detectably dissimilar to cytosine in terms of hybridization properties;
c) contacting the treated genomic DNA, or the treated fragment or portion thereof, with an amplification enzyme and at least two primers comprising, in each case a contiguous sequence at least 18 nucleotides in length that is complementary to, or hybridizes under moderately stringent or stringent conditions to a sequence selected from the group consisting of SEQ ID NOS:150, 151, 155, 156, and complements thereof, wherein the treated DNA, or the fragment or portion thereof is either amplified to produce one or more amplificates, or is not amplified;
d) determining, based on the presence or absence of, or on the quantity or on a property of said amplificate, the methylation state of at least one CpG dinucleotide sequence of SEQ ID NO:149, or an average, or a value reflecting an average methylation state of a plurality of CpG dinucleotide sequences of SEQ ID NO: 149, whereby at least one of a prognosis for, and predicting the outcome of endocrine treatment of the subject is, at least in part, afforded.

12. The method of claim 11, further comprising contacting in c) with at least two primers comprising, in each case a contiguous sequence at least 18 nucleotides in length that is complementary to, or hybridizes under moderately stringent or stringent conditions to a sequence selected from the group consisting of SEQ ID NOS:76-103, SEQ ID NOS:153, 154, 157 and 158, and complements thereof.

13. The method of any one of claims 11 or 12, wherein in b), the one or more reagents comprises a solution selected from the group consisting of bisulfite, hydrogen sulfite, disulfite, and combinations thereof.

14. The method of any one of claims 11 and 12, wherein determining in d) comprises one or more methods taken from the group consisting of oligonucleotide hybridization analysis, Ms-SnuPE, sequencing, Real-Time detection probes, and oligonucleotide array analysis.

15. A nucleic acid molecule consisting of a sequence at least 18 bases in length of a contiguous sequence selected from the group consisting of SEQ ID NOS:2-5, SEQ ID NOS:151-158, and SEQ ID NOS:76-103, and contiguous portions thereof.

16. An oligomer consisting essentially of at least one base sequence having a length of at least 10 contiguous nucleotides, which hybridizes to or is identical to one of the nucleic acid sequences selected from the group consisting of SEQ ID NOS:2-5, SEQ ID NOS:151-158, and SEQ ID NOS:76 to SEQ ID NO:103.

17. The oligomer of claim 16, wherein the oligomer is an oligonucleotide or a peptide nucleic acid (PNA)-oligomer.

18. A composition, comprising:
a nucleic acid comprising a sequence at least 18 contiguous bases in length of a chemically pretreated genomic DNA sequence selected from the group comprising of SEQ ID NOS:2-5, SEQ ID NOS:151, 152, 155, 156, sequences complementary thereto, and contiguous portions thereof; and
a buffer, comprising at least one of: magnesium chloride, dNTP, taq polymerase, an oligomer comprising at least one base sequence having a length of at least 9 contigous nucleotides that is complementary to, or hybridizes under moderately stringent or stringent conditions to a pre-treated genomic DNA selected from the group consisting of SEQ ID NOS:2-5, SEQ ID NOS:151, 152, 155, 156, sequences complementary thereto, and contiguous portions thereof.

19. A method for providing at least one of a prognosis for, and predicting the outcome of endocrine treatment of a subject with a cell proliferative disorder of the breast tissue, comprising: use, in a suitable methylation assay, of at least one of a nucleic acid according to claim 15, an oligomer according to claim 16, and a composition according to claim 18, whereby at least one of a prognosis for, and predicting the outcome of endocrine treatment of the subject is, at least in part, afforded.

The application's sequence listing, which the Patent Office published only in electronic form, follows.

SEQUENCE LISTING (158 sequences)

SEQ ID NO: 1 - DNA, 9001 bp, Homo Sapiens
agctgatggacttgctaaatttctttcttcttttttctttttcatattatttgctagccataatggaatcctctaggtttaagccaaagaaaaattggagagacaaaattagattttgtagcccttttcccccccgggaatgcctttttttttctttttagtttctgatgaatggctatcatttatttctaccaaatttaaataaggactgctgccttgtatgtttaactaggcaggcagagggaactggtttgtttaggaagcagtgactgagatgtcctggccaagttagtgacagaggaggggagaaagaatccagaccaatttgtatgcagtatattttactcccatgaaataaaacacatttgtttcatatttgctgaaaagtaaaacaataatattgtacgaaatgttatacacagggtaggttgtacatagcagtttcagaaacatcattgcatccaccagagaaactattctaaaactgatattcacacattttttataataataataatatgttagaaacatacagtgtggcatttagtatatacactcccttgctcgcaagcgaaaaatcctaatcgcttctgtataacatgctttattttaaagcctaacctttaaaaacactgttgtgatattactaacaactgcttttataaaattaatttgacatttcgatatatatacatcctttcagtcatttaaatgttaacaatgctaaacttaaaaaataacaagcttatagtaatgttaaaatgtcatatccagtcaaacatttgtttgtgtatgtgtccttgcaactgttagaaatacttgtagtgaaagatgtcagacactgaggacatccctttgaaatcaaaggagctctctctttgattcagtggtttccttttctctatatagcttctctttctctccctttctttagtgcccacgaccttctagcataattcccagtctttcaagggcggagttgccccatccggcaaggtcctaggatcccggcgctgtgggtgcggctcacacgggccggtccactgcatactggcaagcactcaggttggaggccgggttctgcacgctggcgtagccgaagctggagtgctgctttgctttcagtctcaggctggccaggctcgagttacacgtgtccctataaacatacggaggagtcggcggcgcgtaaggacaggcaggcgtcggcaccgcggaattcagcgacgggctactcaggttgttcaagttattcaggctgttgagactggagcccgggacgcctgtcactgctgagggcaccatgctggacgacatgctcatggacgagatagagttgggtggggaaaacatgctctgtgatgacagggggttgacgttcatagagttgaagaaggggaagctcttggtggatagggaggcggatgtaaggcccttggcggcccagttgttgtaggaatagcctgggtacatgtcgtcgtagggctgcatgagcccattgaactgcggcccgaagccattcttgcatagctcggcctgctggttgcgctccctctttctccatttggcccgacgattcttgaaccaaacctgggggcggttggggcaagggagcaaacagatgccacagtgcagattactaaaacttccatcggaggccaacccccgccttcccccgacacacacgctagcgcactcacacaccctggcctcgcttcactgcaccgccctgcacaccaagataccagggccagctttcagttactggcccgggtctccaccaagcgcaggagacctggtctgctctggcctgcgagctgggactcggagctacgccacaaacctcagccgaacgcatggagacctgcggacggtttgatcactcagccaggcgtttctccaggtccaaaaacacttaatgtaaaacaaacgcggggcagcaggcttttccaacccttcccggggcaccttgcaaacttgcttccattccaaagccacagacccacggatgaggagaaggggctggaagggcactagaggatcgctctttctcccacgcaattcctcccttccttccctgacctccactgtcgtcccccaccccctggtacgtgctcccttaacagggactaggccgccaacactctttctcgcctagcaaaacaaccaaataaagagcaaaagaccacctcttcgtcagctcgttaactccaggagcttggcatattaaactccgggaacccggaaagggtagttttggagattcccccttctttcgctctgcctcttctttaccctaagcccaccacaggcctgtccgcgcgccaggcccagccgggtcgtttggctttgcaggcggccacccaggccggccggcttccacccgtgtccggtggcccagccgcaaccccgatcccaatccacatcgggcctccctgtcgccccagacggcggcttttgtgtattggagagaggcctggcctgagatatccgagctgacaccagtgatgtttcacattacacatctccgccgggcccagccgtgtaatccgctttttctctttttcctttcattcttgatttcctttttatcccccttcctctttgcacccgactgctataaaaagcacgcctcactcccacttggctcgacaagcagccgccctggaaggagaggcagctgcaaggagagcccagcgccgcggctacaaagcactagggtggagctgcggaatagcgggcggggtgggagggcgttttcgaaggatcccagaaaacccatagactctgtctttaattacttgccatttctaccctaggccatctaaactttgctcaggcgagaagagtacgtgagaggcccgttcccttgatgtgcaagagagctaatgaaagactgaccttgctcaaaaccacgccgcccaggacccagctctggctctggacagttaaactaaaaccattttcaacttcttcccggccttttatccaccagcatagcctcatgccttgcacaaatgccacccagagagtgtcttcattccctctgatttgggagagcattttggtctttattctttttatcgttgttttcttctttttgtttgctctgctctaaccgggggctttattttttctacccagagcacttaattttttttttttaacagcaaagcctctggatgccgcttgatttgcttgattctgttttctgcttccagaatcctaacaaatttggaatcttccaccgaccagcataaaccaggacgttgctattgggttatttatttgagctcatttttgccaatccataaagtacagatttgctacaaagttaaggtaagccctttttacaaaactatgattataatttagaagagggggtgtgagtttcaatttccagagttcaactcctgagagaagataaataaaccaagcagaaaagtctttcttctttttttctttctccttctaagaggactagtagttgtgtattaaaactttgctcccggagatcacaaaactaggaaatagggtgtgtgggagagacctgaatggccgaaacaaccgtaaagaaggtgtaagaagcgcgagcccaggagggaaaaagctgggccagggccgggacaaaggtttcccagggagggccaactcttccgtgtctctggcgggttttccttgttaaaggctcacaggttggagcctgttcgcggctcttggcctggtagggattttattagctctgctctggcaactgcaagccaggaacacaatgtcctgtgcaggggattgcccatgcagcccagctcgtgagatcgcgggatggcggggcagtgagccggtgccgctctgggagcctgagccagggcggcagtcctgtcggcctcggagagggaactgtaatctcgcaaccaggccgccgcgaggccttctgcctttgcaaagctgcgccccaccggcgccctcccaggcggcgctgccttccacattctctcctggtctacttggcctgtacctccacaacatcctccccccatccctcccagactccgtgctggctcctacccggactcgggcttccgtaaggttggtccacacagcgatttcttcgcgtgtggacatgtccgggtagcggttcctctggaaagtggcctccagctcctggagctgctggctggtaaagtgagtccgctgccgcctttgccgcttcttcttagacgggtcctcggcgcccacgtcctcattcttcccctgctggcttttatctttctctgaaaacgaaacacacacactttcccgtcagcatgcccacctgcaacgcggacgccaactggaccggcggcagaagccgtggaagagctgggctgcctggcgccggaggagggtgcgcgcggcggctccgggccgcgaggagcgctgcgcctgtggggtgtgcaggcgcaagtgtgggtgtccgcgccccatttcctcccctcccccagcgccgcacgttttatttacatgtttatctcactgcagcggcacattcacttttatagcctgtgctttcaagtatatttatacacctctgcgcagacacaccaaatctcctgggacgcgcacacgcgcgtggtttacagacccccctccccctcgcagaaagctcagatttccatgcggtttgggaaggctaggaaaagatgtggggattcggttgggcaccgaagttcgccggccctttcccaaaaaaaaaaaaaaaatgcctcttcgcgaagggcatttctgagtggtttcaggcaatttcctaacgagtggagctcctcgggagctgaaagccgagaggaaaacagggacagaggtcggcggcctctgaaggtcctcgaatcaagatgctgggatttttgtgacccaggaaacagaagggaggccagggtacgaatagagagggcggcagaattgctcgcgcccttagcgccccaggagccgggccggtcgagggagaactaaagggatgcggggtagtcaaaattccggctcccggaagttctgcggggagccaggcgaacgaccactcccaccacgcctccccccggaggggctgacttccttggggcgagagggagcgggtggcgcagagcagctgagcgggaatgtctgcagggcggcgcggcgccttacctgcggcctccgggctggaggtgtcggagatggtgtgcacctccagcctgtgcttggaggagtccagcgaccggggctgaccgggagccagaaccgaagccatggctaacggctggggatggtgacaggaagatgaggagacggccgacagcttggtccccgctgctcggtgctccaagtgaagcgggcctttcatgcagttcatggacgagggagcgcgacgctctactagtccttggctactgccccgccgagcccccgtagccgccgctgcccgctccgggtcgcgctctaggcgcggagtttccccgctgcggggagagccaggggacgcaacccccgccgagttctcaagccaagctgcccccgtctcctccggaaggctcaagcgaaaaagtccggagacggaaagtcagcgggcaaacgaagacatgggatgtgggcagaagggcaccactcagagcgtctttagggagcaggcttccaagctccaaagcgaaacaagagtgggcaaagacccccttcttctctccctccctcccccaagaacccctccaataaggaaagctaacgccgaccgcgctctgcccgccccccccccacgcggcagccctgacagagaagtgtcaagagtgacagggacaggtaggtgatattagatcccctgcggcggcagcagccgctgcagccacgacgcggccctctgagcgcaccctccgcaacgcgcacacgcacacccctcgggcggtcgaacaggagccgggccttgccgcagctcagctccaggcacccaggcgagcgacggaccagatctgcggctccgcgcttccctgttggcctaacatcttaaaaccagaggcgggcttcctggtgccgagacgtcactccgccgcggccctccccagccctctccgcctccgcctcctcccagacccttctccgggtgcgactgacgtggctccgcaccaatcaggacgccccgagccgcggtggagggactgtcctgcctgcacctatcagcagtgcggggccgggctactgcctcgccgtgcgcactgggtctacacaggcaagctcccgggaattcagctcctgcccagcccaaggcgatccggcttttagtacgaacccaaaggtgaagagatgaggctaggagtcgaaggcttgggagaagagagtggaatggtcaagaagagaaaggtacaaggatcaacaagacacccactctttgtgtctcactacatccatttccaatcccccaccccatataaaaaggagacacgttacttaaaactagaaaatttgaaaaacagcaacaaatcacctctccgatcttaaattttccaaacagcctgtcaagtgaatgctgcgctaatctgaagaagctttaattgcaaagaagacagagccctgaaaaggcaggctaataaattagaaatcgagaagcaaatggacccgtcaaaagaaaattaccttgactttaaacgaacaactgtttggtggttcactctggatttatacaagaataaaaagtcgcctcagatcacgttctctgtgatgcttattagtccccagacagaaaacacacaatagaagagaaaccctaacccagcgttttcaaaatgctgaaagcttatccattctacttaacgttgattaagacacatatcctagatctttcaaattccttgtacactgtattaagctcgtcctaacccgagagagccacgctttaaattcgactctcttgtttactttattatcaatcagatttaaatccataaagcctgtagaatcaacaaccttgagctaattatatatgaaatatgccttaatgaatttccatacaattaagaatgttgccaaataaccaatttcaaggataatttttaacagtcattttcttttcccagtgagctcaaggctgtcttgagccattaaagtccaagcaggcagaaggggtgtgtgtgagctaagggcgaaaagcctagaactgcgctcaactagcaaaagcaaaaccttatttatataaaacaaaaaaaatcacctttggagacatcaactctttatagcactgtttccaagcaaatttaatttccaaagaaattaaagaaagaaatccaaacatattcaaaataatttttgaaagtccttttgtcccccagcataggtcagctggagaggacaaactaatctcctctgggtttctgcatgggcgattgttttactatggagttagtgttatcatctctgaatgtgtatttgtttgacattacagtcaatgatttgcaatgccagcatgaagtatctttaaaacactccctccttgtccttgttcacaagattgggaaacttattcgatgtggaacaaagtggatgaagcagactacaaatatatttgcaacttatgtgtctctcctttgccctgaccacccccaaaccctatctgcaactcctccccattttaaacttgcagtccaaagacgcacatgagaattgtttttcagtctttcttcaccagtatcatcccactttaagaataatttagctgcaagggaggaatttcttcatagtaagctttaaatcagcatttctgcttttaaccttttattccactttaccccattccacacatacagacacctgctcagagtaaaacacatcctcatgtgacaggtctgcattagctgaggctcatacatccagctatattaggtcctgcaatcttatcactaaattatacacattacactagcagcctgttggtaaagaaggttaaattaatttacattctgctcattatctggtgcttaaatgacgcattttatcccggagatttggcggagaatctccttctcagaccccacagcgtttcactgaagacaatgctcttacatttgtagtggtttttaatctgataagactctaatttgcttaagtcttttaaataagggttttaaatgtttctagccgttttcttattgaatttcctctaattcccccaagatcataaagtatatgtgtaaagtaaatatttcctcccattgcactgccagccgatgacctataactaagtcaataagaatccagctcttttctgctgaatgtgtttactaatcatattccagtttcttcttttaaacctcagaatagctgtggtccccacaataccatgccccttaaagcttcatttcatgaagggactccatcacattaaagaatgaaaaaaatctccactgtagttagtatacacagcccctcactccttgtttttcaagattcaaaccccagagctgcaaatatttttggaagcttgggtgttaatgccttattttagaaagccgagaagccccacagagccatatagatttctaaacccatctctcataaacccacagaattttgataaaagctctggtggctccactctaccgatggaactttcatcacgacaaatatacatgtatgaaggacctcaatcagcctccaaagtggttgaaaaacccaagggcacgtgactgctcctcatagtgccaacgtgtgcgagatgttggaagcactggggatcagcagcagcctagatgcctaaaaagataaggtgtcctaatttgtgtggacccattgaagtcaagtggtgaataaagacaattatctagataattcagattaaagtaaaagcaaaaccatatctatttgtatatatatattcacatccattttatattacagacacacacacgcacacacacactggctctgtaaacaactgactcaaagtgaggattttctttgcatttttccagcaggagtttcaacattctcctaatctcctaatcactttaca

SEQ ID NO: 2 - DNA, 9001 bp, Artificial Sequence
  chemically treated genomic DNA (Homo sapiens)
agttgatggatttgttaaattttttttttttttttttttttttatattatttgttagttataatggaattttttaggtttaagttaaagaaaaattggagagataaaattagattttgtagtttttttttttttcgggaatgtttttttttttttttttagtttttgatgaatggttattatttatttttattaaatttaaataaggattgttgttttgtatgtttaattaggtaggtagagggaattggtttgtttaggaagtagtgattgagatgttttggttaagttagtgatagaggaggggagaaagaatttagattaatttgtatgtagtatattttatttttatgaaataaaatatatttgttttatatttgttgaaaagtaaaataataatattgtacgaaatgttatatatagggtaggttgtatatagtagttttagaaatattattgtatttattagagaaattattttaaaattgatatttatatattttttataataataataatatgttagaaatatatagtgtggtatttagtatatatatttttttgttcgtaagcgaaaaattttaatcgtttttgtataatatgttttattttaaagtttaatttttaaaaatattgttgtgatattattaataattgtttttataaaattaatttgatatttcgatatatatatatttttttagttatttaaatgttaataatgttaaatttaaaaaataataagtttatagtaatgttaaaatgttatatttagttaaatatttgtttgtgtatgtgtttttgtaattgttagaaatatttgtagtgaaagatgttagatattgaggatatttttttgaaattaaaggagttttttttttgatttagtggtttttttttttttatatagtttttttttttttttttttttttagtgtttacgattttttagtataatttttagttttttaagggcggagttgttttattcggtaaggttttaggatttcggcgttgtgggtgcggtttatacgggtcggtttattgtatattggtaagtatttaggttggaggtcgggttttgtacgttggcgtagtcgaagttggagtgttgttttgtttttagttttaggttggttaggttcgagttatacgtgtttttataaatatacggaggagtcggcggcgcgtaaggataggtaggcgtcggtatcgcggaatttagcgacgggttatttaggttgtttaagttatttaggttgttgagattggagttcgggacgtttgttattgttgagggtattatgttggacgatatgtttatggacgagatagagttgggtggggaaaatatgttttgtgatgatagggggttgacgtttatagagttgaagaaggggaagtttttggtggatagggaggcggatgtaaggtttttggcggtttagttgttgtaggaatagtttgggtatatgtcgtcgtagggttgtatgagtttattgaattgcggttcgaagttatttttgtatagttcggtttgttggttgcgttttttttttttttatttggttcgacgatttttgaattaaatttgggggcggttggggtaagggagtaaatagatgttatagtgtagattattaaaatttttatcggaggttaattttcgttttttttcgatatatacgttagcgtatttatatattttggtttcgttttattgtatcgttttgtatattaagatattagggttagtttttagttattggttcgggtttttattaagcgtaggagatttggtttgttttggtttgcgagttgggattcggagttacgttataaattttagtcgaacgtatggagatttgcggacggtttgattatttagttaggcgtttttttaggtttaaaaatatttaatgtaaaataaacgcggggtagtaggtttttttaatttttttcggggtattttgtaaatttgtttttattttaaagttatagatttacggatgaggagaaggggttggaagggtattagaggatcgtttttttttttacgtaattttttttttttttttttgatttttattgtcgttttttattttttggtacgtgtttttttaatagggattaggtcgttaatattttttttcgtttagtaaaataattaaataaagagtaaaagattattttttcgttagttcgttaattttaggagtttggtatattaaatttcgggaattcggaaagggtagttttggagatttttttttttttcgttttgttttttttttattttaagtttattataggtttgttcgcgcgttaggtttagtcgggtcgtttggttttgtaggcggttatttaggtcggtcggtttttattcgtgttcggtggtttagtcgtaatttcgattttaatttatatcgggtttttttgtcgttttagacggcggtttttgtgtattggagagaggtttggtttgagatattcgagttgatattagtgatgttttatattatatattttcgtcgggtttagtcgtgtaattcgttttttttttttttttttttatttttgattttttttttatttttttttttttttgtattcgattgttataaaaagtacgttttatttttatttggttcgataagtagtcgttttggaaggagaggtagttgtaaggagagtttagcgtcgcggttataaagtattagggtggagttgcggaatagcgggcggggtgggagggcgttttcgaaggattttagaaaatttatagattttgtttttaattatttgttatttttattttaggttatttaaattttgtttaggcgagaagagtacgtgagaggttcgtttttttgatgtgtaagagagttaatgaaagattgattttgtttaaaattacgtcgtttaggatttagttttggttttggatagttaaattaaaattatttttaattttttttcggttttttatttattagtatagttttatgttttgtataaatgttatttagagagtgtttttattttttttgatttgggagagtattttggtttttattttttttatcgttgtttttttttttttgtttgttttgttttaatcgggggttttattttttttatttagagtatttaattttttttttttaatagtaaagtttttggatgtcgtttgatttgtttgattttgttttttgtttttagaattttaataaatttggaattttttatcgattagtataaattaggacgttgttattgggttatttatttgagtttatttttgttaatttataaagtatagatttgttataaagttaaggtaagttttttttataaaattatgattataatttagaagagggggtgtgagttttaatttttagagtttaatttttgagagaagataaataaattaagtagaaaagttttttttttttttttttttttttttttaagaggattagtagttgtgtattaaaattttgttttcggagattataaaattaggaaatagggtgtgtgggagagatttgaatggtcgaaataatcgtaaagaaggtgtaagaagcgcgagtttaggagggaaaaagttgggttagggtcgggataaaggttttttagggagggttaattttttcgtgtttttggcgggttttttttgttaaaggtttataggttggagtttgttcgcggtttttggtttggtagggattttattagttttgttttggtaattgtaagttaggaatataatgttttgtgtaggggattgtttatgtagtttagttcgtgagatcgcgggatggcggggtagtgagtcggtgtcgttttgggagtttgagttagggcggtagttttgtcggtttcggagagggaattgtaatttcgtaattaggtcgtcgcgaggttttttgtttttgtaaagttgcgttttatcggcgtttttttaggcggcgttgttttttatatttttttttggtttatttggtttgtatttttataatattttttttttattttttttagatttcgtgttggtttttattcggattcgggttttcgtaaggttggtttatatagcgattttttcgcgtgtggatatgttcgggtagcggtttttttggaaagtggtttttagtttttggagttgttggttggtaaagtgagttcgttgtcgtttttgtcgtttttttttagacgggttttcggcgtttacgtttttattttttttttgttggtttttatttttttttgaaaacgaaatatatatattttttcgttagtatgtttatttgtaacgcggacgttaattggatcggcggtagaagtcgtggaagagttgggttgtttggcgtcggaggagggtgcgcgcggcggtttcgggtcgcgaggagcgttgcgtttgtggggtgtgtaggcgtaagtgtgggtgttcgcgttttattttttttttttttttagcgtcgtacgttttatttatatgtttattttattgtagcggtatatttatttttatagtttgtgtttttaagtatatttatatatttttgcgtagatatattaaattttttgggacgcgtatacgcgcgtggtttatagatttttttttttttcgtagaaagtttagatttttatgcggtttgggaaggttaggaaaagatgtggggattcggttgggtatcgaagttcgtcggtttttttttaaaaaaaaaaaaaaaatgttttttcgcgaagggtatttttgagtggttttaggtaattttttaacgagtggagtttttcgggagttgaaagtcgagaggaaaatagggatagaggtcggcggtttttgaaggttttcgaattaagatgttgggatttttgtgatttaggaaatagaagggaggttagggtacgaatagagagggcggtagaattgttcgcgtttttagcgttttaggagtcgggtcggtcgagggagaattaaagggatgcggggtagttaaaatttcggttttcggaagttttgcggggagttaggcgaacgattatttttattacgttttttttcggaggggttgatttttttggggcgagagggagcgggtggcgtagagtagttgagcgggaatgtttgtagggcggcgcggcgttttatttgcggttttcgggttggaggtgtcggagatggtgtgtatttttagtttgtgtttggaggagtttagcgatcggggttgatcgggagttagaatcgaagttatggttaacggttggggatggtgataggaagatgaggagacggtcgatagtttggttttcgttgttcggtgttttaagtgaagcgggttttttatgtagtttatggacgagggagcgcgacgttttattagtttttggttattgtttcgtcgagttttcgtagtcgtcgttgttcgtttcgggtcgcgttttaggcgcggagttttttcgttgcggggagagttaggggacgtaattttcgtcgagtttttaagttaagttgttttcgtttttttcggaaggtttaagcgaaaaagttcggagacggaaagttagcgggtaaacgaagatatgggatgtgggtagaagggtattatttagagcgtttttagggagtaggtttttaagttttaaagcgaaataagagtgggtaaagatttttttttttttttttttttttttttaagaatttttttaataaggaaagttaacgtcgatcgcgttttgttcgttttttttttacgcggtagttttgatagagaagtgttaagagtgatagggataggtaggtgatattagattttttgcggcggtagtagtcgttgtagttacgacgcggttttttgagcgtatttttcgtaacgcgtatacgtatatttttcgggcggtcgaataggagtcgggttttgtcgtagtttagttttaggtatttaggcgagcgacggattagatttgcggtttcgcgtttttttgttggtttaatattttaaaattagaggcgggttttttggtgtcgagacgttatttcgtcgcggttttttttagtttttttcgttttcgtttttttttagattttttttcgggtgcgattgacgtggtttcgtattaattaggacgtttcgagtcgcggtggagggattgttttgtttgtatttattagtagtgcggggtcgggttattgtttcgtcgtgcgtattgggtttatataggtaagttttcgggaatttagtttttgtttagtttaaggcgattcggtttttagtacgaatttaaaggtgaagagatgaggttaggagtcgaaggtttgggagaagagagtggaatggttaagaagagaaaggtataaggattaataagatatttattttttgtgttttattatatttatttttaattttttattttatataaaaaggagatacgttatttaaaattagaaaatttgaaaaatagtaataaattattttttcgattttaaattttttaaatagtttgttaagtgaatgttgcgttaatttgaagaagttttaattgtaaagaagatagagttttgaaaaggtaggttaataaattagaaatcgagaagtaaatggattcgttaaaagaaaattattttgattttaaacgaataattgtttggtggtttattttggatttatataagaataaaaagtcgttttagattacgttttttgtgatgtttattagtttttagatagaaaatatataatagaagagaaattttaatttagcgtttttaaaatgttgaaagtttatttattttatttaacgttgattaagatatatattttagattttttaaattttttgtatattgtattaagttcgttttaattcgagagagttacgttttaaattcgatttttttgtttattttattattaattagatttaaatttataaagtttgtagaattaataattttgagttaattatatatgaaatatgttttaatgaatttttatataattaagaatgttgttaaataattaattttaaggataatttttaatagttattttttttttttagtgagtttaaggttgttttgagttattaaagtttaagtaggtagaaggggtgtgtgtgagttaagggcgaaaagtttagaattgcgtttaattagtaaaagtaaaattttatttatataaaataaaaaaaattatttttggagatattaattttttatagtattgtttttaagtaaatttaatttttaaagaaattaaagaaagaaatttaaatatatttaaaataatttttgaaagtttttttgttttttagtataggttagttggagaggataaattaattttttttgggtttttgtatgggcgattgttttattatggagttagtgttattatttttgaatgtgtatttgtttgatattatagttaatgatttgtaatgttagtatgaagtatttttaaaatattttttttttgtttttgtttataagattgggaaatttattcgatgtggaataaagtggatgaagtagattataaatatatttgtaatttatgtgttttttttttgttttgattatttttaaattttatttgtaatttttttttattttaaatttgtagtttaaagacgtatatgagaattgttttttagtttttttttattagtattattttattttaagaataatttagttgtaagggaggaatttttttatagtaagttttaaattagtatttttgtttttaattttttattttattttattttattttatatatatagatatttgtttagagtaaaatatatttttatgtgataggtttgtattagttgaggtttatatatttagttatattaggttttgtaattttattattaaattatatatattatattagtagtttgttggtaaagaaggttaaattaatttatattttgtttattatttggtgtttaaatgacgtattttatttcggagatttggcggagaattttttttttagattttatagcgttttattgaagataatgtttttatatttgtagtggtttttaatttgataagattttaatttgtttaagttttttaaataagggttttaaatgtttttagtcgtttttttattgaattttttttaatttttttaagattataaagtatatgtgtaaagtaaatatttttttttattgtattgttagtcgatgatttataattaagttaataagaatttagtttttttttgttgaatgtgtttattaattatattttagtttttttttttaaattttagaatagttgtggtttttataatattatgttttttaaagttttattttatgaagggattttattatattaaagaatgaaaaaaatttttattgtagttagtatatatagttttttattttttgttttttaagatttaaattttagagttgtaaatatttttggaagtttgggtgttaatgttttattttagaaagtcgagaagttttatagagttatatagatttttaaatttattttttataaatttatagaattttgataaaagttttggtggttttattttatcgatggaatttttattacgataaatatatatgtatgaaggattttaattagtttttaaagtggttgaaaaatttaagggtacgtgattgttttttatagtgttaacgtgtgcgagatgttggaagtattggggattagtagtagtttagatgtttaaaaagataaggtgttttaatttgtgtggatttattgaagttaagtggtgaataaagataattatttagataatttagattaaagtaaaagtaaaattatatttatttgtatatatatatttatatttattttatattatagatatatatacgtatatatatattggttttgtaaataattgatttaaagtgaggattttttttgtatttttttagtaggagttttaatatttttttaattttttaattattttata

SEQ ID NO: 3 - DNA, 9001 bp, Artificial Sequence
  chemically treated genomic DNA (Homo sapiens)
tgtaaagtgattaggagattaggagaatgttgaaatttttgttggaaaaatgtaaagaaaatttttattttgagttagttgtttatagagttagtgtgtgtgtgcgtgtgtgtgtttgtaatataaaatggatgtgaatatatatatataaatagatatggttttgtttttattttaatttgaattatttagataattgtttttatttattatttgattttaatgggtttatataaattaggatattttatttttttaggtatttaggttgttgttgatttttagtgtttttaatatttcgtatacgttggtattatgaggagtagttacgtgtttttgggttttttaattattttggaggttgattgaggttttttatatatgtatatttgtcgtgatgaaagttttatcggtagagtggagttattagagtttttattaaaattttgtgggtttatgagagatgggtttagaaatttatatggttttgtggggtttttcggttttttaaaataaggtattaatatttaagtttttaaaaatatttgtagttttggggtttgaattttgaaaaataaggagtgaggggttgtgtatattaattatagtggagattttttttattttttaatgtgatggagtttttttatgaaatgaagttttaaggggtatggtattgtggggattatagttattttgaggtttaaaagaagaaattggaatatgattagtaaatatatttagtagaaaagagttggatttttattgatttagttataggttatcggttggtagtgtaatgggaggaaatatttattttatatatatattttatgattttgggggaattagaggaaatttaataagaaaacggttagaaatatttaaaatttttatttaaaagatttaagtaaattagagttttattagattaaaaattattataaatgtaagagtattgtttttagtgaaacgttgtggggtttgagaaggagatttttcgttaaattttcgggataaaatgcgttatttaagtattagataatgagtagaatgtaaattaatttaattttttttattaataggttgttagtgtaatgtgtataatttagtgataagattgtaggatttaatatagttggatgtatgagttttagttaatgtagatttgttatatgaggatgtgttttattttgagtaggtgtttgtatgtgtggaatggggtaaagtggaataaaaggttaaaagtagaaatgttgatttaaagtttattatgaagaaattttttttttgtagttaaattatttttaaagtgggatgatattggtgaagaaagattgaaaaataatttttatgtgcgtttttggattgtaagtttaaaatggggaggagttgtagatagggtttgggggtggttagggtaaaggagagatatataagttgtaaatatatttgtagtttgttttatttattttgttttatatcgaataagttttttaattttgtgaataaggataaggagggagtgttttaaagatattttatgttggtattgtaaattattgattgtaatgttaaataaatatatatttagagatgataatattaattttatagtaaaataatcgtttatgtagaaatttagaggagattagtttgttttttttagttgatttatgttgggggataaaaggatttttaaaaattattttgaatatgtttggatttttttttttaatttttttggaaattaaatttgtttggaaatagtgttataaagagttgatgtttttaaaggtgattttttttgttttatataaataaggttttgtttttgttagttgagcgtagttttaggtttttcgtttttagtttatatatattttttttgtttgtttggattttaatggtttaagatagttttgagtttattgggaaaagaaaatgattgttaaaaattatttttgaaattggttatttggtaatatttttaattgtatggaaatttattaaggtatattttatatataattagtttaaggttgttgattttataggttttatggatttaaatttgattgataataaagtaaataagagagtcgaatttaaagcgtggttttttcgggttaggacgagtttaatatagtgtataaggaatttgaaagatttaggatatgtgttttaattaacgttaagtagaatggataagtttttagtattttgaaaacgttgggttagggttttttttttattgtgtgttttttgtttggggattaataagtattatagagaacgtgatttgaggcgattttttatttttgtataaatttagagtgaattattaaatagttgttcgtttaaagttaaggtaatttttttttgacgggtttatttgtttttcgatttttaatttattagtttgtttttttagggttttgttttttttgtaattaaagtttttttagattagcgtagtatttatttgataggttgtttggaaaatttaagatcggagaggtgatttgttgttgttttttaaattttttagttttaagtaacgtgttttttttttatatggggtgggggattggaaatggatgtagtgagatataaagagtgggtgttttgttgatttttgtatttttttttttttgattattttattttttttttttaagttttcgatttttagttttatttttttatttttgggttcgtattaaaagtcggatcgttttgggttgggtaggagttgaattttcgggagtttgtttgtgtagatttagtgcgtacggcgaggtagtagttcggtttcgtattgttgataggtgtaggtaggatagtttttttatcgcggttcggggcgttttgattggtgcggagttacgttagtcgtattcggagaagggtttgggaggaggcggaggcggagagggttggggagggtcgcggcggagtgacgtttcggtattaggaagttcgtttttggttttaagatgttaggttaatagggaagcgcggagtcgtagatttggttcgtcgttcgtttgggtgtttggagttgagttgcggtaaggttcggtttttgttcgatcgttcgaggggtgtgcgtgtgcgcgttgcggagggtgcgtttagagggtcgcgtcgtggttgtagcggttgttgtcgtcgtaggggatttaatattatttatttgtttttgttatttttgatatttttttgttagggttgtcgcgtggggggggggcgggtagagcgcggtcggcgttagttttttttattggaggggtttttgggggagggagggagagaagaagggggtttttgtttatttttgtttcgttttggagtttggaagtttgttttttaaagacgttttgagtggtgtttttttgtttatattttatgttttcgtttgttcgttgatttttcgttttcggattttttcgtttgagtttttcggaggagacgggggtagtttggtttgagaattcggcgggggttgcgttttttggtttttttcgtagcggggaaatttcgcgtttagagcgcgattcggagcgggtagcggcggttacgggggttcggcggggtagtagttaaggattagtagagcgtcgcgttttttcgtttatgaattgtatgaaaggttcgttttatttggagtatcgagtagcggggattaagttgtcggtcgtttttttatttttttgttattatttttagtcgttagttatggtttcggttttggttttcggttagtttcggtcgttggatttttttaagtataggttggaggtgtatattattttcgatatttttagttcggaggtcgtaggtaaggcgtcgcgtcgttttgtagatattttcgtttagttgttttgcgttattcgttttttttcgttttaaggaagttagttttttcggggggaggcgtggtgggagtggtcgttcgtttggtttttcgtagaattttcgggagtcggaattttgattatttcgtatttttttagttttttttcgatcggttcggtttttggggcgttaagggcgcgagtaattttgtcgttttttttattcgtattttggttttttttttgttttttgggttataaaaattttagtattttgattcgaggatttttagaggtcgtcgatttttgtttttgtttttttttcggtttttagttttcgaggagttttattcgttaggaaattgtttgaaattatttagaaatgtttttcgcgaagaggtattttttttttttttttgggaaagggtcggcgaatttcggtgtttaatcgaatttttatatttttttttagtttttttaaatcgtatggaaatttgagttttttgcgagggggaggggggtttgtaaattacgcgcgtgtgcgcgttttaggagatttggtgtgtttgcgtagaggtgtataaatatatttgaaagtataggttataaaagtgaatgtgtcgttgtagtgagataaatatgtaaataaaacgtgcggcgttgggggaggggaggaaatggggcgcggatatttatatttgcgtttgtatattttataggcgtagcgtttttcgcggttcggagtcgtcgcgcgtattttttttcggcgttaggtagtttagtttttttacggtttttgtcgtcggtttagttggcgttcgcgttgtaggtgggtatgttgacgggaaagtgtgtgtgtttcgtttttagagaaagataaaagttagtaggggaagaatgaggacgtgggcgtcgaggattcgtttaagaagaagcggtaaaggcggtagcggatttattttattagttagtagttttaggagttggaggttattttttagaggaatcgttattcggatatgtttatacgcgaagaaatcgttgtgtggattaattttacggaagttcgagttcgggtaggagttagtacggagtttgggagggatggggggaggatgttgtggaggtataggttaagtagattaggagagaatgtggaaggtagcgtcgtttgggagggcgtcggtggggcgtagttttgtaaaggtagaaggtttcgcggcggtttggttgcgagattatagtttttttttcgaggtcgataggattgtcgttttggtttaggtttttagagcggtatcggtttattgtttcgttatttcgcgattttacgagttgggttgtatgggtaattttttgtataggatattgtgtttttggtttgtagttgttagagtagagttaataaaatttttattaggttaagagtcgcgaataggttttaatttgtgagtttttaataaggaaaattcgttagagatacggaagagttggttttttttgggaaatttttgtttcggttttggtttagtttttttttttttgggttcgcgttttttatattttttttacggttgtttcggttatttaggttttttttatatattttattttttagttttgtgattttcgggagtaaagttttaatatataattattagtttttttagaaggagaaagaaaaaaagaagaaagatttttttgtttggtttatttatttttttttaggagttgaattttggaaattgaaatttatatttttttttttaaattataattatagttttgtaaaaagggtttattttaattttgtagtaaatttgtattttatggattggtaaaaatgagtttaaataaataatttaatagtaacgttttggtttatgttggtcggtggaagattttaaatttgttaggattttggaagtagaaaatagaattaagtaaattaagcggtatttagaggttttgttgttaaaaaaaaaaaattaagtgttttgggtagaaaaaataaagttttcggttagagtagagtaaataaaaagaagaaaataacgataaaaagaataaagattaaaatgtttttttaaattagagggaatgaagatattttttgggtggtatttgtgtaaggtatgaggttatgttggtggataaaaggtcgggaagaagttgaaaatggttttagtttaattgtttagagttagagttgggttttgggcggcgtggttttgagtaaggttagttttttattagtttttttgtatattaagggaacgggttttttacgtatttttttcgtttgagtaaagtttagatggtttagggtagaaatggtaagtaattaaagatagagtttatgggttttttgggatttttcgaaaacgtttttttatttcgttcgttatttcgtagttttattttagtgttttgtagtcgcggcgttgggttttttttgtagttgtttttttttttagggcggttgtttgtcgagttaagtgggagtgaggcgtgttttttatagtagtcgggtgtaaagaggaagggggataaaaaggaaattaagaatgaaaggaaaaagagaaaaagcggattatacggttgggttcggcggagatgtgtaatgtgaaatattattggtgttagttcggatattttaggttaggtttttttttaatatataaaagtcgtcgtttggggcgatagggaggttcgatgtggattgggatcggggttgcggttgggttatcggatacgggtggaagtcggtcggtttgggtggtcgtttgtaaagttaaacgattcggttgggtttggcgcgcggataggtttgtggtgggtttagggtaaagaagaggtagagcgaaagaagggggaatttttaaaattatttttttcgggttttcggagtttaatatgttaagtttttggagttaacgagttgacgaagaggtggttttttgttttttatttggttgttttgttaggcgagaaagagtgttggcggtttagtttttgttaagggagtacgtattagggggtgggggacgatagtggaggttagggaaggaagggaggaattgcgtgggagaaagagcgattttttagtgtttttttagttttttttttttattcgtgggtttgtggttttggaatggaagtaagtttgtaaggtgtttcgggaagggttggaaaagtttgttgtttcgcgtttgttttatattaagtgtttttggatttggagaaacgtttggttgagtgattaaatcgttcgtaggtttttatgcgttcggttgaggtttgtggcgtagtttcgagttttagttcgtaggttagagtagattaggttttttgcgtttggtggagattcgggttagtaattgaaagttggttttggtattttggtgtgtagggcggtgtagtgaagcgaggttagggtgtgtgagtgcgttagcgtgtgtgtcgggggaaggcgggggttggttttcgatggaagttttagtaatttgtattgtggtatttgtttgtttttttgttttaatcgtttttaggtttggtttaagaatcgtcgggttaaatggagaaagagggagcgtaattagtaggtcgagttatgtaagaatggtttcgggtcgtagtttaatgggtttatgtagttttacgacgatatgtatttaggttatttttataataattgggtcgttaagggttttatattcgtttttttatttattaagagtttttttttttttaattttatgaacgttaattttttgttattatagagtatgttttttttatttaattttatttcgtttatgagtatgtcgtttagtatggtgtttttagtagtgataggcgtttcgggttttagttttaatagtttgaataatttgaataatttgagtagttcgtcgttgaatttcgcggtgtcgacgtttgtttgtttttacgcgtcgtcgattttttcgtatgtttatagggatacgtgtaattcgagtttggttagtttgagattgaaagtaaagtagtattttagtttcggttacgttagcgtgtagaattcggtttttaatttgagtgtttgttagtatgtagtggatcggttcgtgtgagtcgtatttatagcgtcgggattttaggattttgtcggatggggtaatttcgtttttgaaagattgggaattatgttagaaggtcgtgggtattaaagaaagggagagaaagagaagttatatagagaaaaggaaattattgaattaaagagagagtttttttgattttaaagggatgtttttagtgtttgatattttttattataagtatttttaatagttgtaaggatatatatataaataaatgtttgattggatatgatattttaatattattataagtttgttattttttaagtttagtattgttaatatttaaatgattgaaaggatgtatatatatcgaaatgttaaattaattttataaaagtagttgttagtaatattataatagtgtttttaaaggttaggttttaaaataaagtatgttatatagaagcgattaggatttttcgtttgcgagtaagggagtgtatatattaaatgttatattgtatgtttttaatatattattattattataaaaaatgtgtgaatattagttttagaatagtttttttggtggatgtaatgatgtttttgaaattgttatgtataatttattttgtgtataatatttcgtataatattattgttttattttttagtaaatatgaaataaatgtgttttattttatgggagtaaaatatattgtatataaattggtttggattttttttttttttttttgttattaatttggttaggatattttagttattgttttttaaataaattagttttttttgtttgtttagttaaatatataaggtagtagtttttatttaaatttggtagaaataaatgatagttatttattagaaattaaaaagaaaaaaaaaggtattttcgggggggaaaagggttataaaatttaattttgtttttttaatttttttttggtttaaatttagaggattttattatggttagtaaataatatgaaaaagaaaaaagaagaaagaaatttagtaagtttattagtt

SEQ ID NO: 4 - DNA, 9001 bp, Artificial Sequence
  chemically treated genomic DNA (Homo sapiens)
agttgatggatttgttaaattttttttttttttttttttttttatattatttgttagttataatggaattttttaggtttaagttaaagaaaaattggagagataaaattagattttgtagttttttttttttttgggaatgtttttttttttttttttagtttttgatgaatggttattatttatttttattaaatttaaataaggattgttgttttgtatgtttaattaggtaggtagagggaattggtttgtttaggaagtagtgattgagatgttttggttaagttagtgatagaggaggggagaaagaatttagattaatttgtatgtagtatattttatttttatgaaataaaatatatttgttttatatttgttgaaaagtaaaataataatattgtatgaaatgttatatatagggtaggttgtatatagtagttttagaaatattattgtatttattagagaaattattttaaaattgatatttatatattttttataataataataatatgttagaaatatatagtgtggtatttagtatatatatttttttgtttgtaagtgaaaaattttaattgtttttgtataatatgttttattttaaagtttaatttttaaaaatattgttgtgatattattaataattgtttttataaaattaatttgatattttgatatatatatatttttttagttatttaaatgttaataatgttaaatttaaaaaataataagtttatagtaatgttaaaatgttatatttagttaaatatttgtttgtgtatgtgtttttgtaattgttagaaatatttgtagtgaaagatgttagatattgaggatatttttttgaaattaaaggagttttttttttgatttagtggtttttttttttttatatagtttttttttttttttttttttttagtgtttatgattttttagtataatttttagttttttaagggtggagttgttttatttggtaaggttttaggattttggtgttgtgggtgtggtttatatgggttggtttattgtatattggtaagtatttaggttggaggttgggttttgtatgttggtgtagttgaagttggagtgttgttttgtttttagttttaggttggttaggtttgagttatatgtgtttttataaatatatggaggagttggtggtgtgtaaggataggtaggtgttggtattgtggaatttagtgatgggttatttaggttgtttaagttatttaggttgttgagattggagtttgggatgtttgttattgttgagggtattatgttggatgatatgtttatggatgagatagagttgggtggggaaaatatgttttgtgatgatagggggttgatgtttatagagttgaagaaggggaagtttttggtggatagggaggtggatgtaaggtttttggtggtttagttgttgtaggaatagtttgggtatatgttgttgtagggttgtatgagtttattgaattgtggtttgaagttatttttgtatagtttggtttgttggttgtgttttttttttttttatttggtttgatgatttttgaattaaatttgggggtggttggggtaagggagtaaatagatgttatagtgtagattattaaaatttttattggaggttaatttttgtttttttttgatatatatgttagtgtatttatatattttggttttgttttattgtattgttttgtatattaagatattagggttagtttttagttattggtttgggtttttattaagtgtaggagatttggtttgttttggtttgtgagttgggatttggagttatgttataaattttagttgaatgtatggagatttgtggatggtttgattatttagttaggtgtttttttaggtttaaaaatatttaatgtaaaataaatgtggggtagtaggtttttttaattttttttggggtattttgtaaatttgtttttattttaaagttatagatttatggatgaggagaaggggttggaagggtattagaggattgtttttttttttatgtaattttttttttttttttttgatttttattgttgttttttattttttggtatgtgtttttttaatagggattaggttgttaatatttttttttgtttagtaaaataattaaataaagagtaaaagattatttttttgttagtttgttaattttaggagtttggtatattaaattttgggaatttggaaagggtagttttggagattttttttttttttgttttgttttttttttattttaagtttattataggtttgtttgtgtgttaggtttagttgggttgtttggttttgtaggtggttatttaggttggttggtttttatttgtgtttggtggtttagttgtaattttgattttaatttatattgggtttttttgttgttttagatggtggtttttgtgtattggagagaggtttggtttgagatatttgagttgatattagtgatgttttatattatatatttttgttgggtttagttgtgtaatttgttttttttttttttttttttatttttgattttttttttatttttttttttttttgtatttgattgttataaaaagtatgttttatttttatttggtttgataagtagttgttttggaaggagaggtagttgtaaggagagtttagtgttgtggttataaagtattagggtggagttgtggaatagtgggtggggtgggagggtgtttttgaaggattttagaaaatttatagattttgtttttaattatttgttatttttattttaggttatttaaattttgtttaggtgagaagagtatgtgagaggtttgtttttttgatgtgtaagagagttaatgaaagattgattttgtttaaaattatgttgtttaggatttagttttggttttggatagttaaattaaaattatttttaatttttttttggttttttatttattagtatagttttatgttttgtataaatgttatttagagagtgtttttattttttttgatttgggagagtattttggtttttattttttttattgttgtttttttttttttgtttgttttgttttaattgggggttttattttttttatttagagtatttaattttttttttttaatagtaaagtttttggatgttgtttgatttgtttgattttgttttttgtttttagaattttaataaatttggaattttttattgattagtataaattaggatgttgttattgggttatttatttgagtttatttttgttaatttataaagtatagatttgttataaagttaaggtaagttttttttataaaattatgattataatttagaagagggggtgtgagttttaatttttagagtttaatttttgagagaagataaataaattaagtagaaaagttttttttttttttttttttttttttttaagaggattagtagttgtgtattaaaattttgtttttggagattataaaattaggaaatagggtgtgtgggagagatttgaatggttgaaataattgtaaagaaggtgtaagaagtgtgagtttaggagggaaaaagttgggttagggttgggataaaggttttttagggagggttaatttttttgtgtttttggtgggttttttttgttaaaggtttataggttggagtttgtttgtggtttttggtttggtagggattttattagttttgttttggtaattgtaagttaggaatataatgttttgtgtaggggattgtttatgtagtttagtttgtgagattgtgggatggtggggtagtgagttggtgttgttttgggagtttgagttagggtggtagttttgttggttttggagagggaattgtaattttgtaattaggttgttgtgaggttttttgtttttgtaaagttgtgttttattggtgtttttttaggtggtgttgttttttatatttttttttggtttatttggtttgtatttttataatattttttttttattttttttagattttgtgttggtttttatttggatttgggtttttgtaaggttggtttatatagtgatttttttgtgtgtggatatgtttgggtagtggtttttttggaaagtggtttttagtttttggagttgttggttggtaaagtgagtttgttgttgtttttgttgtttttttttagatgggtttttggtgtttatgtttttattttttttttgttggtttttatttttttttgaaaatgaaatatatatatttttttgttagtatgtttatttgtaatgtggatgttaattggattggtggtagaagttgtggaagagttgggttgtttggtgttggaggagggtgtgtgtggtggttttgggttgtgaggagtgttgtgtttgtggggtgtgtaggtgtaagtgtgggtgtttgtgttttattttttttttttttttagtgttgtatgttttatttatatgtttattttattgtagtggtatatttatttttatagtttgtgtttttaagtatatttatatatttttgtgtagatatattaaattttttgggatgtgtatatgtgtgtggtttatagattttttttttttttgtagaaagtttagatttttatgtggtttgggaaggttaggaaaagatgtggggatttggttgggtattgaagtttgttggtttttttttaaaaaaaaaaaaaaaatgtttttttgtgaagggtatttttgagtggttttaggtaattttttaatgagtggagttttttgggagttgaaagttgagaggaaaatagggatagaggttggtggtttttgaaggtttttgaattaagatgttgggatttttgtgatttaggaaatagaagggaggttagggtatgaatagagagggtggtagaattgtttgtgtttttagtgttttaggagttgggttggttgagggagaattaaagggatgtggggtagttaaaattttggtttttggaagttttgtggggagttaggtgaatgattatttttattatgtttttttttggaggggttgatttttttggggtgagagggagtgggtggtgtagagtagttgagtgggaatgtttgtagggtggtgtggtgttttatttgtggtttttgggttggaggtgttggagatggtgtgtatttttagtttgtgtttggaggagtttagtgattggggttgattgggagttagaattgaagttatggttaatggttggggatggtgataggaagatgaggagatggttgatagtttggtttttgttgtttggtgttttaagtgaagtgggttttttatgtagtttatggatgagggagtgtgatgttttattagtttttggttattgttttgttgagtttttgtagttgttgttgtttgttttgggttgtgttttaggtgtggagtttttttgttgtggggagagttaggggatgtaatttttgttgagtttttaagttaagttgtttttgttttttttggaaggtttaagtgaaaaagtttggagatggaaagttagtgggtaaatgaagatatgggatgtgggtagaagggtattatttagagtgtttttagggagtaggtttttaagttttaaagtgaaataagagtgggtaaagatttttttttttttttttttttttttttaagaatttttttaataaggaaagttaatgttgattgtgttttgtttgttttttttttatgtggtagttttgatagagaagtgttaagagtgatagggataggtaggtgatattagattttttgtggtggtagtagttgttgtagttatgatgtggttttttgagtgtattttttgtaatgtgtatatgtatattttttgggtggttgaataggagttgggttttgttgtagtttagttttaggtatttaggtgagtgatggattagatttgtggttttgtgtttttttgttggtttaatattttaaaattagaggtgggttttttggtgttgagatgttattttgttgtggttttttttagttttttttgtttttgtttttttttagatttttttttgggtgtgattgatgtggttttgtattaattaggatgttttgagttgtggtggagggattgttttgtttgtatttattagtagtgtggggttgggttattgttttgttgtgtgtattgggtttatataggtaagtttttgggaatttagtttttgtttagtttaaggtgatttggtttttagtatgaatttaaaggtgaagagatgaggttaggagttgaaggtttgggagaagagagtggaatggttaagaagagaaaggtataaggattaataagatatttattttttgtgttttattatatttatttttaattttttattttatataaaaaggagatatgttatttaaaattagaaaatttgaaaaatagtaataaattatttttttgattttaaattttttaaatagtttgttaagtgaatgttgtgttaatttgaagaagttttaattgtaaagaagatagagttttgaaaaggtaggttaataaattagaaattgagaagtaaatggatttgttaaaagaaaattattttgattttaaatgaataattgtttggtggtttattttggatttatataagaataaaaagttgttttagattatgttttttgtgatgtttattagtttttagatagaaaatatataatagaagagaaattttaatttagtgtttttaaaatgttgaaagtttatttattttatttaatgttgattaagatatatattttagattttttaaattttttgtatattgtattaagtttgttttaatttgagagagttatgttttaaatttgatttttttgtttattttattattaattagatttaaatttataaagtttgtagaattaataattttgagttaattatatatgaaatatgttttaatgaatttttatataattaagaatgttgttaaataattaattttaaggataatttttaatagttattttttttttttagtgagtttaaggttgttttgagttattaaagtttaagtaggtagaaggggtgtgtgtgagttaagggtgaaaagtttagaattgtgtttaattagtaaaagtaaaattttatttatataaaataaaaaaaattatttttggagatattaattttttatagtattgtttttaagtaaatttaatttttaaagaaattaaagaaagaaatttaaatatatttaaaataatttttgaaagtttttttgttttttagtataggttagttggagaggataaattaattttttttgggtttttgtatgggtgattgttttattatggagttagtgttattatttttgaatgtgtatttgtttgatattatagttaatgatttgtaatgttagtatgaagtatttttaaaatattttttttttgtttttgtttataagattgggaaatttatttgatgtggaataaagtggatgaagtagattataaatatatttgtaatttatgtgttttttttttgttttgattatttttaaattttatttgtaatttttttttattttaaatttgtagtttaaagatgtatatgagaattgttttttagtttttttttattagtattattttattttaagaataatttagttgtaagggaggaatttttttatagtaagttttaaattagtatttttgtttttaattttttattttattttattttattttatatatatagatatttgtttagagtaaaatatatttttatgtgataggtttgtattagttgaggtttatatatttagttatattaggttttgtaattttattattaaattatatatattatattagtagtttgttggtaaagaaggttaaattaatttatattttgtttattatttggtgtttaaatgatgtattttattttggagatttggtggagaattttttttttagattttatagtgttttattgaagataatgtttttatatttgtagtggtttttaatttgataagattttaatttgtttaagttttttaaataagggttttaaatgtttttagttgtttttttattgaattttttttaatttttttaagattataaagtatatgtgtaaagtaaatatttttttttattgtattgttagttgatgatttataattaagttaataagaatttagtttttttttgttgaatgtgtttattaattatattttagtttttttttttaaattttagaatagttgtggtttttataatattatgttttttaaagttttattttatgaagggattttattatattaaagaatgaaaaaaatttttattgtagttagtatatatagttttttattttttgttttttaagatttaaattttagagttgtaaatatttttggaagtttgggtgttaatgttttattttagaaagttgagaagttttatagagttatatagatttttaaatttattttttataaatttatagaattttgataaaagttttggtggttttattttattgatggaatttttattatgataaatatatatgtatgaaggattttaattagtttttaaagtggttgaaaaatttaagggtatgtgattgttttttatagtgttaatgtgtgtgagatgttggaagtattggggattagtagtagtttagatgtttaaaaagataaggtgttttaatttgtgtggatttattgaagttaagtggtgaataaagataattatttagataatttagattaaagtaaaagtaaaattatatttatttgtatatatatatttatatttattttatattatagatatatatatgtatatatatattggttttgtaaataattgatttaaagtgaggattttttttgtatttttttagtaggagttttaatatttttttaattttttaattattttata

SEQ ID NO: 5 - DNA, 9001 bp, Artificial Sequence
  chemically treated genomic DNA (Homo sapiens)
tgtaaagtgattaggagattaggagaatgttgaaatttttgttggaaaaatgtaaagaaaatttttattttgagttagttgtttatagagttagtgtgtgtgtgtgtgtgtgtgtttgtaatataaaatggatgtgaatatatatatataaatagatatggttttgtttttattttaatttgaattatttagataattgtttttatttattatttgattttaatgggtttatataaattaggatattttatttttttaggtatttaggttgttgttgatttttagtgtttttaatattttgtatatgttggtattatgaggagtagttatgtgtttttgggttttttaattattttggaggttgattgaggttttttatatatgtatatttgttgtgatgaaagttttattggtagagtggagttattagagtttttattaaaattttgtgggtttatgagagatgggtttagaaatttatatggttttgtggggttttttggttttttaaaataaggtattaatatttaagtttttaaaaatatttgtagttttggggtttgaattttgaaaaataaggagtgaggggttgtgtatattaattatagtggagattttttttattttttaatgtgatggagtttttttatgaaatgaagttttaaggggtatggtattgtggggattatagttattttgaggtttaaaagaagaaattggaatatgattagtaaatatatttagtagaaaagagttggatttttattgatttagttataggttattggttggtagtgtaatgggaggaaatatttattttatatatatattttatgattttgggggaattagaggaaatttaataagaaaatggttagaaatatttaaaatttttatttaaaagatttaagtaaattagagttttattagattaaaaattattataaatgtaagagtattgtttttagtgaaatgttgtggggtttgagaaggagattttttgttaaatttttgggataaaatgtgttatttaagtattagataatgagtagaatgtaaattaatttaattttttttattaataggttgttagtgtaatgtgtataatttagtgataagattgtaggatttaatatagttggatgtatgagttttagttaatgtagatttgttatatgaggatgtgttttattttgagtaggtgtttgtatgtgtggaatggggtaaagtggaataaaaggttaaaagtagaaatgttgatttaaagtttattatgaagaaattttttttttgtagttaaattatttttaaagtgggatgatattggtgaagaaagattgaaaaataatttttatgtgtgtttttggattgtaagtttaaaatggggaggagttgtagatagggtttgggggtggttagggtaaaggagagatatataagttgtaaatatatttgtagtttgttttatttattttgttttatattgaataagttttttaattttgtgaataaggataaggagggagtgttttaaagatattttatgttggtattgtaaattattgattgtaatgttaaataaatatatatttagagatgataatattaattttatagtaaaataattgtttatgtagaaatttagaggagattagtttgttttttttagttgatttatgttgggggataaaaggatttttaaaaattattttgaatatgtttggatttttttttttaatttttttggaaattaaatttgtttggaaatagtgttataaagagttgatgtttttaaaggtgattttttttgttttatataaataaggttttgtttttgttagttgagtgtagttttaggttttttgtttttagtttatatatattttttttgtttgtttggattttaatggtttaagatagttttgagtttattgggaaaagaaaatgattgttaaaaattatttttgaaattggttatttggtaatatttttaattgtatggaaatttattaaggtatattttatatataattagtttaaggttgttgattttataggttttatggatttaaatttgattgataataaagtaaataagagagttgaatttaaagtgtggtttttttgggttaggatgagtttaatatagtgtataaggaatttgaaagatttaggatatgtgttttaattaatgttaagtagaatggataagtttttagtattttgaaaatgttgggttagggttttttttttattgtgtgttttttgtttggggattaataagtattatagagaatgtgatttgaggtgattttttatttttgtataaatttagagtgaattattaaatagttgtttgtttaaagttaaggtaatttttttttgatgggtttatttgttttttgatttttaatttattagtttgtttttttagggttttgttttttttgtaattaaagtttttttagattagtgtagtatttatttgataggttgtttggaaaatttaagattggagaggtgatttgttgttgttttttaaattttttagttttaagtaatgtgttttttttttatatggggtgggggattggaaatggatgtagtgagatataaagagtgggtgttttgttgatttttgtatttttttttttttgattattttattttttttttttaagtttttgatttttagttttatttttttatttttgggtttgtattaaaagttggattgttttgggttgggtaggagttgaatttttgggagtttgtttgtgtagatttagtgtgtatggtgaggtagtagtttggttttgtattgttgataggtgtaggtaggatagtttttttattgtggtttggggtgttttgattggtgtggagttatgttagttgtatttggagaagggtttgggaggaggtggaggtggagagggttggggagggttgtggtggagtgatgttttggtattaggaagtttgtttttggttttaagatgttaggttaatagggaagtgtggagttgtagatttggtttgttgtttgtttgggtgtttggagttgagttgtggtaaggtttggtttttgtttgattgtttgaggggtgtgtgtgtgtgtgttgtggagggtgtgtttagagggttgtgttgtggttgtagtggttgttgttgttgtaggggatttaatattatttatttgtttttgttatttttgatatttttttgttagggttgttgtgtggggggggggtgggtagagtgtggttggtgttagttttttttattggaggggtttttgggggagggagggagagaagaagggggtttttgtttatttttgttttgttttggagtttggaagtttgttttttaaagatgttttgagtggtgtttttttgtttatattttatgtttttgtttgtttgttgattttttgtttttggatttttttgtttgagttttttggaggagatgggggtagtttggtttgagaatttggtgggggttgtgttttttggttttttttgtagtggggaaattttgtgtttagagtgtgatttggagtgggtagtggtggttatgggggtttggtggggtagtagttaaggattagtagagtgttgtgtttttttgtttatgaattgtatgaaaggtttgttttatttggagtattgagtagtggggattaagttgttggttgtttttttatttttttgttattatttttagttgttagttatggttttggttttggtttttggttagttttggttgttggatttttttaagtataggttggaggtgtatattatttttgatatttttagtttggaggttgtaggtaaggtgttgtgttgttttgtagatatttttgtttagttgttttgtgttatttgtttttttttgttttaaggaagttagtttttttggggggaggtgtggtgggagtggttgtttgtttggttttttgtagaatttttgggagttggaattttgattattttgtatttttttagtttttttttgattggtttggtttttggggtgttaagggtgtgagtaattttgttgttttttttatttgtattttggttttttttttgttttttgggttataaaaattttagtattttgatttgaggatttttagaggttgttgatttttgtttttgttttttttttggtttttagtttttgaggagttttatttgttaggaaattgtttgaaattatttagaaatgttttttgtgaagaggtattttttttttttttttgggaaagggttggtgaattttggtgtttaattgaatttttatatttttttttagtttttttaaattgtatggaaatttgagttttttgtgagggggaggggggtttgtaaattatgtgtgtgtgtgtgttttaggagatttggtgtgtttgtgtagaggtgtataaatatatttgaaagtataggttataaaagtgaatgtgttgttgtagtgagataaatatgtaaataaaatgtgtggtgttgggggaggggaggaaatggggtgtggatatttatatttgtgtttgtatattttataggtgtagtgttttttgtggtttggagttgttgtgtgtatttttttttggtgttaggtagtttagtttttttatggtttttgttgttggtttagttggtgtttgtgttgtaggtgggtatgttgatgggaaagtgtgtgtgttttgtttttagagaaagataaaagttagtaggggaagaatgaggatgtgggtgttgaggatttgtttaagaagaagtggtaaaggtggtagtggatttattttattagttagtagttttaggagttggaggttattttttagaggaattgttatttggatatgtttatatgtgaagaaattgttgtgtggattaattttatggaagtttgagtttgggtaggagttagtatggagtttgggagggatggggggaggatgttgtggaggtataggttaagtagattaggagagaatgtggaaggtagtgttgtttgggagggtgttggtggggtgtagttttgtaaaggtagaaggttttgtggtggtttggttgtgagattatagttttttttttgaggttgataggattgttgttttggtttaggtttttagagtggtattggtttattgttttgttattttgtgattttatgagttgggttgtatgggtaattttttgtataggatattgtgtttttggtttgtagttgttagagtagagttaataaaatttttattaggttaagagttgtgaataggttttaatttgtgagtttttaataaggaaaatttgttagagatatggaagagttggttttttttgggaaatttttgttttggttttggtttagtttttttttttttgggtttgtgttttttatattttttttatggttgttttggttatttaggttttttttatatattttattttttagttttgtgatttttgggagtaaagttttaatatataattattagtttttttagaaggagaaagaaaaaaagaagaaagatttttttgtttggtttatttatttttttttaggagttgaattttggaaattgaaatttatatttttttttttaaattataattatagttttgtaaaaagggtttattttaattttgtagtaaatttgtattttatggattggtaaaaatgagtttaaataaataatttaatagtaatgttttggtttatgttggttggtggaagattttaaatttgttaggattttggaagtagaaaatagaattaagtaaattaagtggtatttagaggttttgttgttaaaaaaaaaaaattaagtgttttgggtagaaaaaataaagtttttggttagagtagagtaaataaaaagaagaaaataatgataaaaagaataaagattaaaatgtttttttaaattagagggaatgaagatattttttgggtggtatttgtgtaaggtatgaggttatgttggtggataaaaggttgggaagaagttgaaaatggttttagtttaattgtttagagttagagttgggttttgggtggtgtggttttgagtaaggttagttttttattagtttttttgtatattaagggaatgggttttttatgtattttttttgtttgagtaaagtttagatggtttagggtagaaatggtaagtaattaaagatagagtttatgggttttttgggattttttgaaaatgtttttttattttgtttgttattttgtagttttattttagtgttttgtagttgtggtgttgggttttttttgtagttgtttttttttttagggtggttgtttgttgagttaagtgggagtgaggtgtgttttttatagtagttgggtgtaaagaggaagggggataaaaaggaaattaagaatgaaaggaaaaagagaaaaagtggattatatggttgggtttggtggagatgtgtaatgtgaaatattattggtgttagtttggatattttaggttaggtttttttttaatatataaaagttgttgtttggggtgatagggaggtttgatgtggattgggattggggttgtggttgggttattggatatgggtggaagttggttggtttgggtggttgtttgtaaagttaaatgatttggttgggtttggtgtgtggataggtttgtggtgggtttagggtaaagaagaggtagagtgaaagaagggggaatttttaaaattattttttttgggtttttggagtttaatatgttaagtttttggagttaatgagttgatgaagaggtggttttttgttttttatttggttgttttgttaggtgagaaagagtgttggtggtttagtttttgttaagggagtatgtattagggggtgggggatgatagtggaggttagggaaggaagggaggaattgtgtgggagaaagagtgattttttagtgtttttttagttttttttttttatttgtgggtttgtggttttggaatggaagtaagtttgtaaggtgttttgggaagggttggaaaagtttgttgttttgtgtttgttttatattaagtgtttttggatttggagaaatgtttggttgagtgattaaattgtttgtaggtttttatgtgtttggttgaggtttgtggtgtagttttgagttttagtttgtaggttagagtagattaggttttttgtgtttggtggagatttgggttagtaattgaaagttggttttggtattttggtgtgtagggtggtgtagtgaagtgaggttagggtgtgtgagtgtgttagtgtgtgtgttgggggaaggtgggggttggtttttgatggaagttttagtaatttgtattgtggtatttgtttgtttttttgttttaattgtttttaggtttggtttaagaattgttgggttaaatggagaaagagggagtgtaattagtaggttgagttatgtaagaatggttttgggttgtagtttaatgggtttatgtagttttatgatgatatgtatttaggttatttttataataattgggttgttaagggttttatatttgtttttttatttattaagagtttttttttttttaattttatgaatgttaattttttgttattatagagtatgttttttttatttaattttattttgtttatgagtatgttgtttagtatggtgtttttagtagtgataggtgttttgggttttagttttaatagtttgaataatttgaataatttgagtagtttgttgttgaattttgtggtgttgatgtttgtttgtttttatgtgttgttgatttttttgtatgtttatagggatatgtgtaatttgagtttggttagtttgagattgaaagtaaagtagtattttagttttggttatgttagtgtgtagaatttggtttttaatttgagtgtttgttagtatgtagtggattggtttgtgtgagttgtatttatagtgttgggattttaggattttgttggatggggtaattttgtttttgaaagattgggaattatgttagaaggttgtgggtattaaagaaagggagagaaagagaagttatatagagaaaaggaaattattgaattaaagagagagtttttttgattttaaagggatgtttttagtgtttgatattttttattataagtatttttaatagttgtaaggatatatatataaataaatgtttgattggatatgatattttaatattattataagtttgttattttttaagtttagtattgttaatatttaaatgattgaaaggatgtatatatattgaaatgttaaattaattttataaaagtagttgttagtaatattataatagtgtttttaaaggttaggttttaaaataaagtatgttatatagaagtgattaggattttttgtttgtgagtaagggagtgtatatattaaatgttatattgtatgtttttaatatattattattattataaaaaatgtgtgaatattagttttagaatagtttttttggtggatgtaatgatgtttttgaaattgttatgtataatttattttgtgtataatattttgtataatattattgttttattttttagtaaatatgaaataaatgtgttttattttatgggagtaaaatatattgtatataaattggtttggattttttttttttttttttgttattaatttggttaggatattttagttattgttttttaaataaattagttttttttgtttgtttagttaaatatataaggtagtagtttttatttaaatttggtagaaataaatgatagttatttattagaaattaaaaagaaaaaaaaaggtatttttgggggggaaaagggttataaaatttaattttgtttttttaatttttttttggtttaaatttagaggattttattatggttagtaaataatatgaaaaagaaaaaagaagaaagaaatttagtaagtttattagtt

SEQ ID NO: 6 - DNA, 22 bp, Artificial Sequence
  PRIMER
gtaggggagggaagtagatgtt

SEQ ID NO: 7 - DNA, 24 bp, Artificial Sequence
  PRIMER
ttctaatcctcctttccacaataa

SEQ ID NO: 8 - DNA, 20 bp, Artificial Sequence
  oligonucleotide probe
agtcggagtcgggagagcga

SEQ ID NO: 9 - DNA, 27 bp, Artificial Sequence
  oligonucleotide probe
agttggagttgggagagtgaaaggaga

SEQ ID NO: 10 - DNA, 25 bp, Artificial Sequence
  PRIMER CONTROL
tggtgatggaggaggtttagtaagt

SEQ ID NO: 11 - DNA, 27 bp, Artificial Sequence
  PRIMER CONTROL
aaccaataaaacctactcctcccttaa

SEQ ID NO: 12 - DNA, 30 bp, Artificial Sequence
  PROBE CONTROL
accaccacccaacacacaataacaaacaca

SEQ ID NO: 13 - DNA, 408 bp, Homo Sapiens
tcctcaactctgcaggcctgaaagaaggtcacacacgcacgctcacacccacactccacacgcctcgtcccaaacaaccccatgaacattgtcctttgttccgtctcttgggccactttccctgtcgcttcctcccagcccgtcctgatttgctccccaaaagtacgtttctgtctccccgctgccctggcgctccccctttgatttattagggctgccgggttggcgcagattgctttttcttctcttccatcccatcctcccttctggtcctcctttccacagtgggagtccgtgctcctgctcctcggttggctcctaagtgccccgccaggtcccctctcctttcgctctcccggctccggctcccgactcttcggcccgctggcatctgcttccctcccctgc

SEQ ID NO: 14 - DNA, 22 bp, Artificial Sequence
  chemically treated genomic DNA (Homo sapiens)
aacatctacttccctcccctac

SEQ ID NO: 15 - DNA, 32 bp, Artificial Sequence
  chemically treated genomic DNA (Homo sapiens)
gttagtagagattttattaaattttattgtat

SEQ ID NO: 16 - DNA, 14 bp, Artificial Sequence
  chemically treated genomic DNA (Homo sapiens)
ttcggttgcgcggt

SEQ ID NO: 17 - DNA, 16 bp, Artificial Sequence
  chemically treated genomic DNA (Homo sapiens)
tttggttgtgtggttg

SEQ ID NO: 18 - DNA, 144 bp, Homo Sapiens
ttctggtcctcctttccacagtgggagtccgtgctcctgctcctcggttggctcctaagtgccccgccaggtcccctctcctttcgctctcccggctccggctcccgactcttcggcccgctggcatctgcttccctcccctgc

SEQ ID NO: 19 - DNA, 162 bp, Homo Sapiens
tggcatctgcttccctcccctgcctcgtttctcgtcgcccctgctcgctccccccggcgctcgcccgggcgctgtgctcgctcctggatcgccagccgcgcagcgggctcgccggcgcccgcgcgccactgtgcagtggagtttggtggaatctctgctgac

SEQ ID NO: 20 - DNA, 2235 bp, Homo Sapiens
tgggagtccgtgctcctgctcctcggttggctcctaagtgccccgccaggtcccctctcctttcgctctcccggctccggctcccgactcttcggcccgctggcatctgcttccctcccctgcctcgtttctcgtcgcccctgctcgctccccccggcgctcgcccgggcgctgtgctcgctcctggatcgccagccgcgcagccgggctcggccggccgcccgcgcgccactgtgcagtggagtttggtggaatctctgctgacgtcacgtcactccccacacggagtaggagcagagggaagagagagggatgagagggagggagaggagagagagtgcgagaccgagcgagaaagctggagaggagcagaaagaaactgccagtggcggctagatttcggaggccccagtgcacccgtggactccttcggaacttggcaccctcaggagccctgcagtcctctcaggcccggctttcgggcgcttgccgtgcagccggaggctcggctcgctggaaatcgccccgggaagcagtgggacgcggagacagcagctctctcccggtagccgataacggggaatggagaccaactgccgcaaactggtgtcggcgtgtgtgcaattaggcgtgcagccggcggccgttgaatgtctcttctccaaagactccgaaatcaaaaaggtcgagttcacggactctcctgagagccgaaaagaggcagccagcagcaagttcttcccgcggcagcatcctggcgccaatgagaaagataaaagccagcaggggaagaatgaggacgtgggcgccgaggacccgtctaagaagaagcggcaaaggcggcagcggactcactttaccagccagcagctccaggagctggaggccactttccagaggaaccgctacccggacatgtccacacgcgaagaaatcgctgtgtggaccaaccttacggaagcccgagtccgggtttggttcaagaatcgtcgggccaaatggagaaagagggagcgcaaccagcaggccgagctatgcaagaatggcttcgggccgcagttcaatgggctcatgcagccctacgacgacatgtacccaggctattcctacaacaactgggccgccaagggccttacatccgcctccctatccaccaagagcttccccttcttcaactctatgaacgtcaaccccctgtcatcacagagcatgttttccccacccaactctatctcgtccatgagcatgtcgtccagcatggtgccctcagcagtgacaggcgtcccgggctccagtctcaacagcctgaataacttgaacaacctgagtagcccgtcgctgaattccgcggtgccgacgcctgcctgtccttacgcgccgccgactcctccgtatgtttatagggacacgtgtaactcgagcctggccagcctgagactgaaagcaaagcagcactccagcttcggctacgccagcgtgcagaacccggcctccaacctgagtgcttgccagtatgcagtggaccggcccgtgtgagccgcacccacagcgccgggatcctaggaccttgccggatggggcaactccgcccttgaaagactgggaattatgctagaaggtcgtgggcactaaagaaagggagagaaagagaagctatatagagaaaaggaaaccactgaatcaaagagagagctcctttgatttcaaagggatgtcctcagtgtctgacatctttcactacaagtatttctaacagttgcaaggacacatacacaaacaaatgtttgactggatatgacattttaacattactataagcttgttattttttaagtttagcattgttaacatttaaatgactgaaaggatgtatatatatcgaaatgtcaaattaattttataaaagcagttgttagtaatatcacaacagtgtttttaaaggttaggctttaaaataaagcatgttatacagaagcgattaggatttttcgcttgcgagcaagggagtgtatatactaaatgccacactgtatgtttctaacatattattattattataaaaaatgtgtgaatatcagttttagaatagtttctctggtggatgcaatgatgtttctgaaactgctatgtacaacctaccctgtgtataacatttcgtacaatattattgttttacttttcagcaaatatgaaacaaatgtgttttatttcatgggagtaaaatatactgcatac

SEQ ID NO: 21 - protein, 317 aa, Homo sapiens
METNCRKLVSACVQLGVQPAAVECLFSKDSEIKKVEFTDSPESRKEAASSKFFPRQHPGANEKDKSQQGKNEDVGAEDPSKKKRQRRQRTHFTSQQLQELEATFQRNRYPDMSTREEIAVWTNLTEARVRVWFKNRRAKWRKRERNQQAELCKNGFGPQFNGLMQPYDDMYPGYSYNNWAAKGLTSASLSTKSFPFFNSMNVNPLSSQSMFSPPNSISSMSMSSSMVPSAVTGVPGSSLNSLNNLNNLSSPSLNSAVPTPACPYAPPTPPYVYRDTCNSSLASLRLKAKQHSSFGYASVQNPASNLSACQYAVDRPV

SEQ ID NO: 22 - DNA, 21 bp, Artificial Sequence
  chemically treated genomic DNA (Homo sapiens)
gtaggggagggaagtagatgt

SEQ ID NO: 23 - DNA, 23 bp, Artificial Sequence
  chemically treated genomic DNA (Homo sapiens)
tcctcaactctacaaacctaaaa

SEQ ID NO: 24 - DNA, 16 bp, Artificial Sequence
  chemically treated genomic DNA (Homo sapiens)
agtcgggagagcgaaa

SEQ ID NO: 25 - DNA, 16 bp, Artificial Sequence
  chemically treated genomic DNA (Homo sapiens)
agttgggagagtgaaa

SEQ ID NO: 26 - DNA, 17 bp, Artificial Sequence
  chemically treated genomic DNA (Homo sapiens)
aagagtcgggagtcgga

SEQ ID NO: 27 - DNA, 17 bp, Artificial Sequence
  chemically treated genomic DNA (Homo sapiens)
aagagttgggagttgga

SEQ ID NO: 28 - DNA, 16 bp, Artificial Sequence
  chemically treated genomic DNA (Homo sapiens)
ggtcgaagagtcggga

SEQ ID NO: 29 - DNA, 16 bp, Artificial Sequence
  chemically treated genomic DNA (Homo sapiens)
ggttgaagagttggga

SEQ ID NO: 30 - DNA, 16 bp, Artificial Sequence
  chemically treated genomic DNA (Homo sapiens)
atgttagcgggtcgaa

SEQ ID NO: 31 - DNA, 16 bp, Artificial Sequence
  chemically treated genomic DNA (Homo sapiens)
tagtgggttgaagagt

SEQ ID NO: 32 - DNA, 24 bp, Homo Sapiens
gaaaggcagagtcataacaggaag

SEQ ID NO: 33 - DNA, 26 bp, Homo Sapiens
taaggatagagtgatttccaagaaag

SEQ ID NO: 34 - DNA, 24 bp, Homo Sapiens
cttatctgacaacaagcgagtatg

SEQ ID NO: 35 - DNA, 25 bp, Homo Sapiens
caattattgtattgtagcatcggag

SEQ ID NO: 36 - DNA, 24 bp, Artificial Sequence
  chemically treated genomic DNA (Homo sapiens)
ttctaatcctcctttccacaataa

SEQ ID NO: 37 - DNA, 22 bp, Artificial Sequence
  chemically treated genomic DNA (Homo sapiens)
gtaggggagggaagtagatgtt

SEQ ID NO: 38 - DNA, 144 bp, Artificial Sequence
  Example 7 amplificate 1
gcaggggagggaagcagatgccagcgggccgaagagtcgggagccggagccgggagagcgaaaggagaggggacctggcggggcacttaggagccaaccgaggagcaggagcacggactcccactgtggaaaggaggaccagaa

SEQ ID NO: 39 - DNA, 24 bp, Artificial Sequence
  chemically treated genomic DNA (Homo sapiens)
ttctaatcctcctttccacaataa

SEQ ID NO: 40 - DNA, 30 bp, Artificial Sequence
  chemically treated genomic DNA (Homo sapiens)
gagattttattaaattttattgtatagtgg

SEQ ID NO: 41 - DNA, 279 bp, Artificial Sequence
  Example 7 amplificate 2
gagattccaccaaactccactgcacagtggcgcgcgggcggccggccgagcccggctgcgcggctggcgatccaggagcgagcacagcgcccgggcgagcgccggggggagcgagcaggggcgacgagaaacgaggcaggggagggaagcagatgccagcgggccgaagagtcgggagccggagccgggagagcgaaaggagaggggacctggcggggcacttaggagccaaccgaggagcaggagcacggactcccactgtggaaaggaggaccagaa

SEQ ID NO: 42 - DNA, 24 bp, Artificial Sequence
  chemically treated genomic DNA (Homo sapiens)
ttttggaaagtggtttttagtttt

SEQ ID NO: 43 - DNA, 19 bp, Artificial Sequence
  chemically treated genomic DNA (Homo sapiens)
ccaaacaacccaactcttc

SEQ ID NO: 44 - DNA, 234 bp, Artificial Sequence
  Example 7 amplificate 3
ctctggaaagtggcctccagctcctggagctgctggctggtaaagtgagtccgctgccgcctttgccgcttcttcttagacgggtcctcggcgcccacgtcctcattcttcccctgctggcttttatctttctctgaaaacgaaacacacacactttcccgtcagcatgcccacctgcaacgcggacgccaactggaccggcggcagaagccgtggaagagctgggctgcctgg

SEQ ID NO: 45 - DNA, 22 bp, Artificial Sequence
  chemically treated genomic DNA (Homo sapiens)
gatgttgggatttttgtgattt

SEQ ID NO: 46 - DNA, 20 bp, Artificial Sequence
  chemically treated genomic DNA (Homo sapiens)
cccaaaaaaatcaacccctc

SEQ ID NO: 47 - DNA, 224 bp, Artificial Sequence
  Example 7 amplificate 4
gatgctgggatttttgtgacccaggaaacagaagggaggccagggtacgaatagagagggcggcagaattgctcgcgcccttagcgccccaggagccgggccggtcgagggagaactaaagggatgcggggtagtcaaaattccggctcccggaagttctgcggggagccaggcgaacgaccactcccaccacgcctccccccggaggggctgacttccttggg

SEQ ID NO: 48 - DNA, 22 bp, Artificial Sequence
  chemically treated genomic DNA (Homo sapiens)
gagatggtgtgtatttttagtt

SEQ ID NO: 49 - DNA, 23 bp, Artificial Sequence
  chemically treated genomic DNA (Homo sapiens)
tccataaactacataaaaaaccc

SEQ ID NO: 50 - DNA, 182 bp, Artificial Sequence
  Example 7 amplificate 5
gagatggtgtgcacctccagcctgtgcttggaggagtccagcgaccggggctgaccgggagccagaaccgaagccatggctaacggctggggatggtgacaggaagatgaggagacggccgacagcttggtccccgctgctcggtgctccaagtgaagcgggcctttcatgcagttcatgga

SEQ ID NO: 51 - DNA, 20 bp, Artificial Sequence
  chemically treated genomic DNA (Homo sapiens)
gatgtgggtagaagggtatt

SEQ ID NO: 52 - DNA, 23 bp, Artificial Sequence
  chemically treated genomic DNA (Homo sapiens)
ctcttaacacttctctatcaaaa

SEQ ID NO: 53 - DNA, 198 bp, Artificial Sequence
  Example 7 amplificate 6
gatgtgggcagaagggcaccactcagagcgtctttagggagcaggcttccaagctccaaagcgaaacaagagtgggcaaagacccccttcttctctccctccctcccccaagaacccctccaataaggaaagctaacgccgaccgcgctctgcccgccccccccccacgcggcagccctgacagagaagtgtcaagag

SEQ ID NO: 54 - DNA, 24 bp, Artificial Sequence
  chemically treated genomic DNA (Homo sapiens)
gataggtaggtgatattagatttt

SEQ ID NO: 55 - DNA, 24 bp, Artificial Sequence
  chemically treated genomic DNA (Homo sapiens)
cctaaatacctaaaactaaactac

SEQ ID NO: 56 - DNA, 155 bp, Artificial Sequence
  Example 7 amplificate 7
gacaggtaggtgatattagatcccctgcggcggcagcagccgctgcagccacgacgcggccctctgagcgcaccctccgcaacgcgcacacgcacacccctcgggcggtcgaacaggagccgggccttgccgcagctcagctccaggcacccagg

SEQ ID NO: 57 - DNA, 23 bp, Artificial Sequence
  chemically treated genomic DNA (Homo sapiens)
ggaagaatttgttgttggttgtt

SEQ ID NO: 58 - DNA, 22 bp, Artificial Sequence
  chemically treated genomic DNA (Homo sapiens)
tcaactctttcctctaactaaa

SEQ ID NO: 59 - DNA, 265 bp, Artificial Sequence
  Example 7 amplificate 8
ggaagaacttgctgctggctgcctcttttcggctctcaggagagtccgtgaactcgacctttttgatttcggagtctttggagaagagacattcaacggccgccggctgcacgcctgggccacgcgcgcgcccgccccacgtgcggagagaggcgtcccggaccgcggccgaaaggagccggggacgggaggagggggaggggcgaggcaggccggaggagaaagagggacaaagagcaaagacccagttagaggaaagagctga

SEQ ID NO: 60 - DNA, 23 bp, Artificial Sequence
  chemically treated genomic DNA (Homo sapiens)
agagggataaagagtaaagattt

SEQ ID NO: 61 - DNA, 21 bp, Artificial Sequence
  chemically treated genomic DNA (Homo sapiens)
ccaataacctctccctataac

SEQ ID NO: 62 - DNA, 213 bp, Artificial Sequence
  Example 7 amplificate 9
agagggacaaagagcaaagacccagttagaggaaagagctgacggcatccccgtcccccggaccctctggcaacccggggcaggatggcgtactctttctgcgcctccccggttgccggcggttccagccgggaggagtaggctggggggcttcggtacacagcgcgccgctgcttcctagtccaccgccccgccacagggagaggccactgg

SEQ ID NO: 63 - DNA, 23 bp, Artificial Sequence
  chemically treated genomic DNA (Homo sapiens)
agagggataaagagtaaagattt

SEQ ID NO: 64 - DNA, 21 bp, Artificial Sequence
  chemically treated genomic DNA (Homo sapiens)
acaaaaaaacactaaccctac

SEQ ID NO: 65 - DNA, 304 bp, Artificial Sequence
  Example 7 amplificate 10
agagggacaaagagcaaagacccagttagaggaaagagctgacggcatccccgtcccccggaccctctggcaacccggggcaggatggcgtactctttctgcgcctccccggttgccggcggttccagccgggaggagtaggctggggggcttcggtacacagcgcgccgctgcttcctagtccaccgccccgccacagggagaggccactggcgatttggttctgatttccttcctgcccaggctggcccctcggggaagcgcccctcgctggggcctcgccgcagggccagtgccctcttgc

SEQ ID NO: 66 - DNA, 22 bp, Artificial Sequence
  chemically treated genomic DNA (Homo sapiens)
gtaggagaagggggtttttatt

SEQ ID NO: 67 - DNA, 23 bp, Artificial Sequence
  chemically treated genomic DNA (Homo sapiens)
ttataatcctctaacctctaaac

SEQ ID NO: 68 - DNA, 329 bp, Artificial Sequence
  Example 7 amplificate 11
gcaggagaagggggttcttacctaattgcacacacgccgacaccagtttgcggcagttggtctccattccccgttatctgcaaaacagaagagaaggaaggctgtaagaagcggcggccgtcgagtgagcagggctcagatgagactacgttacactagctgttaggcgcctactgtgtgctaggcttcaggcgtgtttttccgacctgacagcctctggctgtgcagcagcatctccagcctagcctcgggcccaggacatttatttatcaagaggggatctccctccagagttgccgcaaaagtgcccagaggttagaggactataa

SEQ ID NO: 69 - DNA, 6499 bp, Homo Sapiens
tactgcatattctcacttataactggcagctaatcattgaatacacatagacataaatgtattttaacacattattattcccacttagattctgtgtaatatttaaccatttaattacatcaacaaataaaagcctttagaaattgatgtatctagcacaattaaggggtaatttgtttatgattacaggagtcatttcatttacactaatttgatgtgaggagacaatcaaattccttttttcctataagaaaaacttaattccgggaggcttaggcaggagaatctcttgaacccaggaggcagaagttgcagtgagccgagattgcaccattgcactccagcctgggcaacaagagtgaaactctgtctcaaaaaaataaataaataaaataaaataaaaagtaaaacttaaccctcacattttttctttaaaaacattacactattgaaatagaatagaattttggacctcaatgtttctatgctttttgacaatgtaaagattatatcaagaataacattgactccttgtgcacatgtgtgaaactatgtcgagctgatgtatccagaaaagaaattgcagcgatattgggtatagaatttccaatctcaacctccttcttgttgtggaatagaaatttagttccaccttctctgttcataatacataagagtagataatcagatatgaggtgattaaatatataaactgatttcacagttaccatggaaagaccataatatgtttggacgaggtgggggaaagagtctccctctgaactgagatttgaataggctttagatagactaaaaacccatggcctgtcttcttcaacttcccatcattgatcatctgggagaatcaaaatggcctggattataaagtgattacaattagtagggcaggcatactaaataaaaatggggtgagtgtgcttggatgggaaaaactggggtgcagagaaatatttcctgttttggaggcttcgttcatagcgagcctgaggatgcagatgatatggaacatgagccccaccaggatatacatcctcctgcacagtcttccctgatcagtgctgtctattgccctaggcaccatcctcagccactctgtgttaggcacttaggacagttctgttcaaagcatgattgctttctggtcagtgaagaaatagtaaagaaatgagagtctgcttttgaagcttttgtagcaacttaacatttctgcaatgtcgtggtacatgttttatattttttaaaagtattcatctgcagactagaaataaaagagtccttcagcacagatagtttgagagatgctactgtagagtgccctgggaggatgggattcttctagacattgacggctccctggagtggtgctggagcttgctgagatagggacgcggggattgctgtggaacagcatgttgtgaaaacaggcacagatgggctgttgccacgtactcagtatttggcaggcccaggcaccctgccccggggagacagagcaacagctgtcatttccaaaaatgtgacacaaatatgactttcgttttttattgtatgtgtatgcatgtgtgcatgcgcatgtgtggttggtgtgtgggtaaataatattggtgagggagttagcagtgcagagacgcagagatgaatctaatgaatttatatttggaggcccttgaaaggagccctgtgcatgcataatcaggaagcagaagtgcagtcgtaggccagtcccatcctctggtggaaacagcaaattacagccttagcacttctcacctgtagcaaaagaaatgtatgctgcacctgggaggggtaggagaacttcttagaatttggtgggtttattagtcagggttgtgtagagaaacagaaccaatgagataaatatgttagatagatgatagatagatagatagatagatagatagatagatagatagatagagatgatagatgatatagatagatgatagatgatagataatagatgatacatagatagatatagcaaatagatctatagatatgacagagagagaatgagagagatttacattaaagaattggctcacatgattgtgggggctgcaaatcctacatctgtagaatttgctggcaggatggaaattcaggtaagagtggatattgtagccttgagtcgaaagtccacagggcagcaagctggaaactcaggcaaggtttctaggttgcagtcttaagaagaatttcatattctttaggaaacctcagtctgtgttcttagggtcttcaactgattgaatgaagcacaaacattatggaaggaaatccggtttactcaaagtctgctggattaagcattaatcccaactaaaaaacgccttcacagcaacatttagactactgttcagccaagtatctgggcaccatagctcagataagttgacgtataaaattcaccatcacaagggaggaatttatatatacactttattgcagcaaaatctttacagtttaacgttttgtacttttcccagaaggaaacgtttcagtgcagagttgaatatcgcatctttccgtagctcatacaaatcccatacaactttgatttgctgagcctctcctgaaaactggacaacttaagtgttcatgaaaggttttaattgcttaagaaaatagactgtttgtgtgaattacaaagaaaaagggattttagaaggaacattggtactccgggaagcaggttggggcaaggcttgcataagtgaatcagaagttttaggcacgaagtcagcacctctgtcatggcctatgtcagttgagtctttacctttgcctcgtgcctggccttcagaccctgtgagcccgctccgggacagggttacggccaatccagcagagattctggcaaagcatcccgggaatgagagtgagaaaggcccaaagcagtcaaggcccaaagacaaccctcgaccccatctctccaaatgtcagccctcaagatctcaggctctctggacctcaatctccatgccacttcaaaggccccaaatttcagccccagcagctccagctcatagccctaggtcttcagagatcactccagtaactcccaaatatcaccccagggatccagttctgacagccaagaccactcctctcataaaataatcgcagatattaggtgaagatccccaaagccccaaggaaaccctaaatctcatcctgaggacaccgatcccaccaaagccccgaggaaaccccaaatttcatctcgaggacaccagtcccaccgttaggaaccgggacctcaacccacagcacccggattccgagaacagaggcttcggggccaaatgggctgaatccagtacctcactcccacgcccccgggtggacagcaaccctcctccaccgcgtcccctcgtgggttttaggtcctatatttgagggatgtggcctcctccttttatatcatgttggccaagaatgatctacacagtcatcatggaatattgcatggagataaggagtggctgtgcccctgcctgaagggctcatcccattcatgaggcaggatgaccctcaaggcagtgctactcactagagtcaaagctcaggtaaggtgtttaggggccagttgcaacatgaagcacattagccaaggcagtctcaaagagtattgccagaggaagaatctacacctggctgtttaatgaggttgaaaggcaaatctaggtcaagcaggccaagtaaagaggtcagcccagcactttgggaggcagaggcaggtggatcacctgaggtcaggagttcgagaccagcctggccaacatggtgaaaccttgtctttactaaaaatacaaaaattagctgggtgtggtggcacgcgcctgtaatcccagctattcaggaggctgaggcaggagaattgcttgaaccagggaggcggaggttgtggtgagccaagatcaggccactgcactccagcctgggtgacagagtgaaactccgcctcaaaaaataaataaataaataaataaaaataaaaaagaagtcagaaagcccatgaaaaacatttggagggaagaagttagtccaagaataaaagcattaggtcagggcgtctaagatccccaaggattggtcctggctgtgtagacacttaaagagattgtgcaaggctggacaggagggtgagctggccaaaaaggtgatctgctaactgtggaatcaaccaccgcccaatgtcctggataactgagtctgactcgcaatggttaggcttaccattgtaaatcagtcttgaagtataaacaagttcattaaactacccctcctgtttacattttcttttattccctgattcatgtaatctctgtagctcatatctaaataaaaaataataacatggacttgttattatgcatgtcgtggtttacttctaactgtaaagtttctgattattctcctgtcatgctgatcttcatgtcagaagaaaacgctttgctattcaccatgagtgcagaaaactgcttactagaaacgattctaaacagcaaaggatgtatatttgaaataatagggttgtaatgaaaaagtacatatttctcaatctcattcaatacattgtacccgtagagtaaaagatatagaaaagcatcttatgttttaaaaatgtaagtctgagagtgaaaaacagagacaataaaaacctttctctaaatattattggtggaaaagtctcaaagcaatagaaagtatatataaaatgcctgtgaatttttgtgcaataaaatcatatatatatatgtgtgtgtgtatgtatatttgttttttttgttttgttttgtttttttttttttttttgagacggagtctcgctctgtcgcccaggctggagtgcagtggcgggatctcggctcactgcaagctccgcctcccgggttcacgccattctcctgcctcagcctcccaagtagctgggactacaggcgcccgccactacgcccggctaattttttgtatttttagtagagacggggtttcaccgttttagcggggttggtctcgatctcctgacctcgtgatctgcccgcctcggcctcccaaagtgctgggattacaggcgtgagccaccgcgcccggccaatgtatgtatatttgtaactcagatttgtaaatgcagccacattcatatccacacatcaaatgcaccaaaaagattcactaagttcctcatagtcagtccataaattcccagcttcttcacatattcgcattttttgtcttaacatgatataatagttaaaaaaatttaaaaattaataattaaccaagtttttttttcttgtagactatatcagccattattcagaaacattaattcattgttttaaaaataatttctctagagatgtttggcacttagtatatgaaatcatttataattgaataatacaaacaaaacagaaaaaagaacttacttttgggacatctgaagaaagtgacctacaaactcagtttatccctgagtctcattatttttaggaaaatggtctctatgtcatctctatgttatgtttgacttgtcttgcttgagtctgttttccagaaagattgtgatccttggcctgttgaatatgaaatttacatgatcactcttgggaaaaattccttttttagtgactgcaagccaggtcctgtggccgagaagcatcagctgtacttggttgactgactgtattactctgttttcatgctgctcataaagacatacctgagacttggcaatttacaaaagaggtttaacagactcacagtgtcaagtgggtgggggtgcctcacaatcatggcggaaggtgaaaggcatgtctcacatggtggcagacaagagaagagagcttgcgcaggaaaatttcctcttataaaaccatcagacctcatgagacttactcactatcacaagaatagcacgggaaggacccacccccatgattcaattacctccaaccaggaccctccacaacatgtgggaattatgggaactacaattcaagataagatttgggtgaggtcacagccaaccatatcactgactttcatcatattataaagaactatcttgcagagagaatctgctttccatctctaataatttgtttattctggatatttcacataaatagagttatataatatttgttgctggctttttcatttagtgtaatgttttcaaggttcatctgtgttagagtatgtacctttgcttcattcctttacatcactaaataatattcgattgtatggatgtgccacattttatttgatctcttatcagttgacagactgttgggtttttctactttttggctattacgaatgatggtactatatgaacattcacacacaagttttcatgggtatatgtttttatctttcttgggtatatacctaggtgggggattgctgtcatatggtaactttatgtttaacatcctgagga

SEQ ID NO: 70 - DNA, 6456 bp, Homo Sapiens
caagaatttcaagtcattatccctgtgcatgcaggcagtaccagtgccagcaataacaagtcagcttttctggcaaatccatcaaaattaaatcttaaacttttgaaaaaactaatatgtttattatgctcctgttagcttagaggcttaactatctgtgggggagggcctataattatgatcaattacttatgacttgaaggtacttataaaagcatctgcccttttaagaaaccattaaagaaccaggcttaagactgtaaaactaatcccaggggcaatagtaaatcacaggtttggggacccaactttgacaactctcccttggaaagaaaagaattgctgtcaactgtccttatttcctgaccctgtctgagcaaatattcgcagcctctaaaatccagaattcttagtctggccaagcaagtcatggggaccaatggttgtttcaaggcagaggcagaagagaagaaacaggaaggaaacaaaaagggaatgaagatctgtagctcatgagggtgacatcatcaataatttcctcaagtatcactgaatttcatggctcgtgactgagagtcttttctgacatcttacaggctaattatcctcaaggatcttcttggttccagagcctgtaatgtctgggtttgaatatgatttgttctacaaaaaaggtcaggtgaattgacccctccctgtgaagctgctccatggcaagagaccatcaatctgctgaaacgcaaacaatcctttagatatctgaagtactttcaaatttacaaagtgctttcacatacgccatctcattttattctcacgactttaacaggtaggtgccatcatcaccttaacacgtaaaaataattttagaaaacaatgcctttgtcttcagttcataagaatatcctcctgaaattcacagtacagaatccaagtcatgggtcagttagaaacgtctagaaacacatcaatctcaggaggataaatcaagagaataggatggatcagacaaaatctacaagcacaatggcagaaagtgtgcctctggtataagaatggcgtaagctttgtaaacaatagtgttatacaggggtgcctctgtagtacctctacgtttggaaggacactattcattcatatacatgataagcacccttaactggatactccataggtaacagacaaaataaaacaagaacttccgtcttaaaattgtagtggtggaattcatccttcgggatgtattaggtgattcccctaggacgacagctgagttacagggggctaaatataccctccccttttccctccaatatcacaaagagccccaaaaacggattttgttgtttttaacaaataaaatacacatgaaaaaaagtcatctataggtttttatatataatctcatcttctaaaacactcattctccttcactagctaggccgaggtataatgcggtcttaactttataaccatttactgccttatttatatatttatgattctttgatgccttctagcttgagtctaaactgcgttgggaacaaagcaccgcacaaatcaccagcctgggataagaggagacaagttaaaacctcccaagaagattctgtagatatttggtctctctgagtctgtagagagtttggtatttcaaaggtcagtcttgggtctctccactttgatgactaatgttaaattgtttgactttttacaaaaatatttagctgtgcttatttacatcatttcatcctcagcgcacacagtaggcatgtatttgttgaacagaagccctaaatggatgagaaaaaagatatttctgctacacattttctcaagatcgagaaaggtaaaatcacaacccaatttgcagaagtttctaggcattccttttcaatgtaaagctatgcatctctgtttaaaaaagaaaaggatgacacaaccaaacaatgtcaaccacacaatggggaaattccaggatcactaagaaaacaccattatcctaagtcacacattttcatttaatactggttaccacacaggagagagtaagaactgctgtctccccacccactcgcacaatccatctgggaaaagcatgggcagaacatttatgatctaaccataccacatcttggactcacatttaaccctttggagaattagtctaaagagtatgtccgcccagagatataaagtaaaacagacacagggataacagttttggaagaaatttttatgacgctgtttgagattgggcatcagcactcaaactccttagaccaccaggagtcattcttactacgcaactttaataaagagaaactgagagtatgactggcaaaaatattatgatgtttctgcatcttgttaacctgatttacacttggctccacccataaagttcccactgattatcacacggcatcctcattctccagtctcacctactctgtctttcaaaaattccccaacggcatggccacgaaaaatatgcgggggctagcggggcatgtctcaggttggcttatcctgtccctaaaacgcacccacttcccccagaccctccttcagggtgggcagggagaaaacgcttctaagttgcacagctgcagggaagcctgctcaggtcatgtttttttgacttgtctttcggctcgctgtctggcaaggtcaccggctctggctcgcggctctgtcgacaaaacttaactctcactctgtaagaccaacaggtcgcgcaggacctccccagtcgccctctgccccgcacctttctgggcctgaggattcccggctcggccctccccgcgcgcgcgaggccccagatggcgagggcgcagctccctggctcacctgaccacgttggggtgctcgaaggtctccaggtgcctcagcaccgccacctcgcggatggtggagagcggcatgccctcctcgccggtctgcacccgcacgcgcttcaacgccacgaaacggcctccgttcttcaagtcgcgggccttgaacaccttcccataggcgccctccccgatctccgccacgcattcgtactgctggtcagcgcggcacaggccgtccttctccatgccgcctggacgccgcccgccgcggcgccgctggggcgggcggggggtgcgctcaactagctggcggccgccgctcgcctactccggggctccccggagatcggtctagctttacttgctccccgccggctcaggcgctcgggcgctggggctttcgccgctgcagaagctggatggagagacctccccgcggggctggcgtaaccctggtgccgccgccgcgaaactccgcctgcagagtcgccgccgccgccgccgccggaggagcgagccgatccctcctcttccctcctcgaagcgaagtcctcaacacagacacgattacatagcctctgcccaagcgcgtctcagtccagaatcattgcacctaaaggaggagacgggaggataagaagaaagtgcaatcagacagcccagaagccttcctcggggttcctccagactcccctcctcctcctttacgaagcctccatcgctaccctccgcgcgctcctgccctctcccaagccgcttaatccttcctggttcctccgagaaaagcgaagttacttttctttccctgcagggctgaagccgtcttcgcgcggagaggttgcaggggcccctcggggatgagcgagcggcgcgggacgcagtggaacgggagggggcgtgccgagcagcccagagtgtgccgggagcgcgggggaggggaggcgccgggcacgtcaatgtcacggcttaatatttatccctatatcattgtgttgcgccgctaccctccccgcctcctgaggcccggacgtgcagggagacggggtccaggggtgccggagggcgttcaggggtcgcgcacaagctggagcggaaggactgtgggtccatccgtgtggggccgcagaatgtgggtgggggctcccaggaccctgtaacccgatgctgggagtgtgcgagaaggggtggtcagacatctgctcagaaattgcttcctttctttctactttcagtttttctacgaggagacatttaaaaacgactcgcatacacaaatggtctttttggggtaaaggagtctcggttggaaacggaattctctctccggctgggaggacctccctggtggaaaccttgggaagaccagccatctggtcggggagggttggggcttatcgggggtgggcgagcgagcggtcctgggggaggggagacaccgtcccccacgggatcccaagggtgggagaaaggggtgttcgccacaatttcgcttgtcgtctccttaaagaataacttcaggaaggggatagcataatcgcgcctcgtccttaagttttaaactgatttcgacctgagcaaaactcaacctccctttcaaagggtggggggtggggggttaaatcctgcgcctccaggggtgagagagaaggtctctgtcctcggggcccggactcgcgaaccttttcccattcccaggacctccccgctgtaggtagcagaggtggctgccccattccccctccggctaaaggcccggtccagtctgcagccggacgcccccggagccctctgcacaacaaagcgccagagtagggtaccctaactttccctccccattcagcagctatctgggacctagggggcctccctcctccagggccgccgcggcctcggcaggactttcaccacgacggccgcatgtccggaattcccggggcacctcggaattacctgcctcgcaaccgctggcccgctcgccttttgccaggaattaaacaaacggcgcgacccccacgatgagcgggtggagcggaccgcggcgagagcagagcttctggcactcactacattcagaactttccttaaaagccgaggaaagagcccccagggactgcccgggggtctgagccaggtcgagggccacacaggtagccggggagccgccgccggccgcccaacccgcctgtcctgcatccccccaaccccctcccgctcgagtctagccccgggctccgcagcgaaggaagcgtcggggacgtcccacccccgcagggaactgcgcctgctgcccccgccgggccccgcactgccctggctctccccccactcgccccccagacggtcggcttcggcggagagaaacgggagcagcaatgccttttccccccctctcctccacttttttttgttgttgttgttgctttcccacgctggctgaatgtgacttgaccccatttcaaaaaaagtttgacatagtgcttcaacatttccgcattcctccgcgactacaaaggctgcagccgcctccttctgctttctgtctctgctctctgtcttcacactcaatgaaatccttcatgcgcctctcccgaagcctgccaagcaccacaagggtcgccaccagcacagcgacaagaggccacaccggggaccgcgactcccgcgtgtgcgcacacgcagatgcgcccatatgcacacggacgggcgcgctgcggggaccagggctgctcactgcggggcgtgtgtttaactccaatattttaaattataaaagtaaacttggaaactacagcaaacgtgcgtcttcgcggggctccaagcctgggcactggccggctgcgtgcacttttctgtgtataacacgcccgcaggaagcctgcgttaacatttatctcgtggaggggaaggtggagcccacacccacacctcagcgagctggagagggagttttcgagggggaaatgcaagcacattctccagcatggagtccctagaggcagtgcattttaaaccctaaatgtgaattattatgtgagtgtccgagtagagttccagttccgtttggagaaactgtatgaggcgtgttccgtgtgggtgtgtgtgcgtacggatacgtggaagcaggatctcggtgtcgcgggtgtccctaggctgggatctccccctctcatcagataaggagaatcctctagctccccaaaactggcccccataaccaatcccgtctcagttcgtaaggggttaaccaaagccgattccaaggaaacacaggtcccccccaccccccgccaccctccacttaccccacccacagttctgcctcggaccccggccaatcccccagatctcccccgggaccccccaccccgcagcccacccacccgagcgcacagctcctcacctgaggggcccagtcgcgtcgggcctcccgagggggctgcgagtgtcagtcggctctccgcacgtgtccgcggcctcgcggagcaggtaatcagactctggggaaggagttaccagcactctctccggcgagggggtgggcacagcggcggagggcggagggacggcggagggcgccgcccgcgccgctcgctgggggcggacgggggccgct

SEQ ID NO: 71 - DNA, 6257 bp, Homo Sapiens
ccacagtagctttcctgactggactaacctttccggacacaacagcagggcaggggtggggcctggggagaaaggacacctctaaccctgatcctaacatcccgatggcctctaaggctgcctgcacactcatccaggtgcaagccctccaaggtgtggtgtgatgaaccagtgactcctggagccaggtcagcgcatcctcttcccgcagggctgtaagctgcaggactgagaggcaggttgaccaggtcctgggctggatgatggggtgagagtaaggggtcagttttgatacatgcccaacttttctctctagccctaagacatcctgggcaaattgcttacctcagttcccctgatcctcaccctaaccctaacaccagctcaagagaaaatagggatattgatggccatccagaagggctgctgtgttccatacacagcaatatttctcgaatgtttgtgacagcggtccaaggaataagttaattttacattatcactctggatacctgtacaaaactccaccttatccttactatatgaatgtgctagggttgtttttttgttttgttttttttttttttttttgagacagagtttcgctcttgttgcccaggctggagtacaatggcgcgatcttggctcaccgcaacctccgcttcccaggttcaagcgattcacctgcctcagccttcccgagtagctgggattacaggcatgcgccaccatgcccggctaattttgtgtttttagtagagacagggtttctccatgttggtcaggctggtaccaaactcccgacctcaggtgatccacctgccttggcctcccaaagtgctgcaattacaggcatgagccaccgcacccagccgtgctagggtctttttctgttcaattcctttctctctcttgctctctttctttctttcaatggagtcttactctgtcacccaggctggagtgcagtggcaagatctcagctcactgcaacctctgccctctgagttcaagcaattctcctgcctcagcctcccgagtagctgggattacaggtgcctgccaccacacctagttaatttttgtacttttagtagagatggggttttgtcatgttggccaggctggtctcgaactcctgacctcgtgatctgcctgtcttggcctcccaaagtgctgggattacaggcatgagccgccatactcggccaactttgtattactttcttaaagagagtttcccaaattatataagcttcaggccccacaaaacctagatctgccccagtataactaaatctgggaccatttattgagcaattattatgtgccaagtattgcgctgagtgcttccagagcattatctcctttaaccccagcatagtatgtcagatgctgttttacagatgagccaactgagaccagagatgctcagtcacttgcccaaggtgacatgactgatatggaatagagtcaagatttttttttttttttttgacacggagtctcactctgtctcccaggctggagtgcagaggcgcaatctcagctcactgcaagctctgcctcccaggttcacgccattctcctgcctcagcctcctgagtagctgggactacaggcacccgccaccacacctggctaattttttgtatttttagcagagacagggtttcaccgtgttagccaggatggtctcgatctcctgacctcgtgatctgcctgcctcggcctcccaaagtgctggaattacaggtgtgagccaccgcgactggccagattcaagatttgaacccaggtcctcttggtcccagaggcccctgtttctcaactccctaggatggcatagcaacctgtcccacaagaggtgcctgctttaagtgtgctcagcacatggaagcaagtttagaaatgcaagtgtatacctgtaaagaggtgtgggagatgggggggagggaagagagaaagagatgctggtgtccttcattctccagtccctgataggtgcctttgatcccttcttgaccagtatagctgcattcttggctggggcattccaactagaactgccaaatttagcacataaaaataaggaggcccagttaaatttgaatttcagataaacaatgaataatttgttagtataaatatgtcccatgcaatatcttgttgaaattaaaaaaaaaaaaaaaagtcttccttccatccccacccctaccactaggcctaaggaatagggtcaggggctccaaatagaatgtggttgagaagtggaattaagcaggctaatagaaggcaaggggcaaagaagaaaccttgaatgcattgggtgctgggtgcctccttaaataagcaagaagggtgcattttgaagaattgagatagaagtctttttgggctgggtgcagttgctcgtggttgtaattccagcactttgggaggctgaggcgggaggatcacctgaggttgggagttcaagaccagcctcaccaacgtggagaaaccctgtctttactaaaaatacaaaaaattagctggtcatggtggcacatgcctgtaatcccagctgctcgggaggctgaggcaggagaatcacttgaaccagggaggcagaggttgtggtgagcagagatcgcgccattgctctccagcctgggcaacaagagcaaaagttcgtttaaaaaaaaaaaaaagtcctttcgatgtgactgtctcctcccaaatttgtagaccctcttaagatcatgcttttcagatacttcaaagattccagaagatatgccccgggggtcctggaagccacaaggtaaacacaacacatccccctccttgactatcaattttactagaggatgtggtgggaaaaccattatttgatattaaaacaaataggcttgggatggagtaggatgcaagctccccaggaaagtttaagataaaacctgagacttaaaagggtgttaagagtggcagcctagggaatttatcccggactccgggggagggggcagagtcaccagcctctgcatttagggattctccgaggaaaagtgtgagaacggctgcaggcaacccaggcgtcccggcgctaggagggacgcacccaggcctgcgcgaagagagggagaaagtgaagctgggagttgccactcccagacttgttggaatgcagttggagggggcgagctgggagcgcgcttgctcccaatcacaggagaaggaggaggtggaggaggagggctgcttgaggaagtataagaatgaagttgtgaagctgagattcccctccattgggaccggagaaaccaggggagccccccgggcagccgcgcgccccttcccacggggccctttactgcgccgcgcgcccggcccccacccctcgcagcaccccgcgccccgcgccctcccagccgggtccagccggagccatggggccggagccgcagtgagcaccatggagctggcggccttgtgccgctgggggctcctcctcgccctcttgccccccggagccgcgagcacccaaggtgggtctggtgtggggaggggacggagcagcggcgggaccctgccctgtggatgccccgccgaggtcccgcggccggcggggccagaggggcccggacgagctctcctatcccgaagttgtggacagtcgagacgctcagggcagccgggccctggggccctcgggcgggagggggcagttacacggcagcggctcgagatggcccatccaagagactggcgctttccaggctccgaggggctccgggaacttgtcaaagaagttctctgaaattgttcagaaagttttcccgcaaagggtgtattgcgtagagcgcgcgcgcgcgtttccccccttcttgagccccctcaagctttctcaaagcctttccagttggcagcctccgcctccggactggcctgggctggattccttgggggggtcctctgccctgcccctcctccagcccctccccgctccccttcagacgattttggtttggttgctcctgcttctggcggggtcgggtgtgtgtgtgtgtggtggagtggagggtggcatagcaacctgtcccaaccagagccggggaggaaagggtggcccggagggtggcctcttgctggggtctgggttgggggcgggggagacgtttgctttgaacagattcttggggccagcttagggactgtgctctgtgacttttggagcgcgtggaccatggaggggtgggggtgggtttcttggggtgtaaagtgggagagttcccagagaaggaagctaagaaataaggccagatgggagcctagggagggctgcgttgttctgctgccttttccttggtgctgtgcgtggggaagggtgagtgggggcagtgtgtatcctgacccatctgtccacctgtgtgcattaatcataaaagctaacatatagcctgggccaggtatactctgccaggaactgtttgtggtgttttgcatgcattctcctttaatcctagaacacccctatagtggaagttctgccagcattctggactgagtagcagtccagaggttgagtagcagctagtaagtggtggggtcaagatgggaccccaggcagtgcgacccccaaccatgcattcgaaatcgctatatggatgagtgcacctggagcaatgagggacactgctccctgagtcactgggctgcaggggagacaaaatgaaagtgttctgggagtcgtgggtggtctccataggtcagagggtctggggagggagtgggtgtcatcgtggctgtgtgttgcccgaggggccctctgtgagtgagtgcatggccgtgttatctctgcaggtctacgccagggtgttcctcagttgtgtggtctttgtatttgtgtgtctgggctttgtgttgccaaacagcagtctctctgctgacttggggacacaggctgaactctgtcctctgcaggaactcccttaaggtgctgggccagatctgccataaacagagggaggtagccttctatggccacgccttcttgctgaggaagaaggttcctctcttccagggagtacatccttgccctccctgtttcccagacaagcatcttcacctctcatcttctgatgagaagggtgaggccatactgagctgtcaggctgagctgctgcccttcctcaccttgggctgggagttgatcagggaatggcagttgctgcagagctggatttgagggctgggttctctggatggggcctcctcatgtcctcacccctcaacctgcactattgattgtgttgtgcaggagttagttaaaaagtcattgcacagcctgggcaacaaggcaaaactctgtacaaaaaatacaaaaattagttggatgtgattacacgtgcctgtagtcccagctactccggaggctgaggcaggaggatcacctgagcccaggaagttgaggcttgcagtgagctgtgattgcaaatgctctccagcctgggtgacagtgtgagactccgtttcagaaaaaaagtataccacccagctgcctccagcacccagattttacccaaggggtgaggtctggggcaggaatgtgggggaaggggaggcctagggggagccccagaggggtcaggatttttctgaaatcctttcttagaggtatgggttttacaaattgcagcaaatacatccttttaatcttgcagaactccttcatattttaattccagtatgattcttccaacagcctcctctctttactatacttggggaaagtactcattttatttgtcaagaaaaaaacaattgaaaagatagggatcaaatgtaaaaagaaaaaatacgtggcattccaaagtcaaacacaaagcatgtttaattttctcgtggtttgggattacccatattcctgctgtatgaacctgtcttgtcttaacttttaagaaatgtacggtgtacttcctatatgctaggtttttatccatgctttcatttaatctctgtgacagtcctgtgaagtaggtgcacagatgagaaaatggaagttcagagaaatgaagcaacttatccaaggctcccagctacccagtaatgtccagggaatttttggactctgaagaggaggcattaagaggtggttagagtcttattccagccaacaataatgggttgaacaaagccttaggggcaggcaggtggccagatgggaggagaagcgctcctcttgttcaggcgaatgacctttccatccacttctc

SEQ ID NO: 72 - DNA, 8467 bp, Homo Sapiens
atgaatcaaacctttctctggcaccaagaagggacatacagtattccgagctctgcccttgttttcttatcaagttttctctaacagctggaagtggttgaagggggctgtcttaaggagaccccctgctcttcttttgacagctgatcaaaagaaaataggtcacgcttctcaaacttatgtccaccctgtccttaattactgtctctttaaacaaaggcaacatctgcgcaacctcagctagcttgaatcttcggaggcaaacagagcgcaacctgctttggaagaatcttgttacgtttaaggctttatgccgggtgttggcctctctgtcttcaactacccctccaccccgactcggactgcagaaatctccaactctctgtcccccagttccactcccacctccagacctggggttgccaaacaacggaaattctaggaagacgtaggtgcggtttttaaagccttggcttgtgagcgttctcaggctggccggggcgctggtcttttcagaaacaaggtttgaatatgcaggtgtcagccaggattccttgtcgtctgcccaccgccgtttctctcccgggatttgagagaagcgggagtgtgtgtgtgtgtgtgtgtgtgtgtgtgtgcgcgtgtgtgtgtctcgtgttaggagaaaggtccgtggttgccgtctcagctggtttgcttactctctgcccccaggagaagtttgctcacttgggacaccagcgaccctcctcacctccacctcaccggttctacactctccccacttctttccaagtcgctgatgcagaaagcacttggtcaccttgaaacggcagctcccggaattctagttttgttttgcaatctagcagggctcttcggaagcctcataactgagatttatgggctcaccgggtaattaaatgatgttattgtgttaactttgcatgcattactgctgcccgcgccgcccgtgggccgccggccggccgcagctcgctggcgacgagggcactacagttgctctgaccgcgtagattatgcatgtcccggcctcgggaatttaccatgcattagaatacattagcgcctgcattttaaaaggctaaactattggctcccagctagggactctcggtaagtggcttgttagtgacgagtgtttgtctatactggcacatagcggagtcttttgctcccggcttactcgcctccaggaaagctttggggtgaggcgaaggcgattgaagcaatgccccttcccccagatcgcagctgctcaggggggacacagcacggcatctttcaccgaatctctctcgctcgctcgcactccagcctccctctccccagcgacccccccaccttctcctccctccctctccttgacgtttgattccagtagcaaaggaggtaaaaaaggcaccgagccgtcagccaaacctgaaaagtgcggccccgccccctccacagccactggtagcttcccgtggaaggcccgcctcccggggcagctgcggcctcggagtggttgcgcttggcgcccgtcgggcgtggccccgccccaggtccgggagggtaggttggctgccccggcgagcggcagagcccttctggacagctcccgctcacccaaacagaagacgtcggcgccggagcgggctcggacatggcgaggctgcgagccggcccgagcggcggggcccggtgatccctccctccctccccgtcccctcccctctcccgcacgcacgccccgtccgcccccaccccgcccccaccccgggcgagcccgcccgcagcccggggcgcacacccgcacgcgcactcctctccactcactcccgcgcccgcccccactcccgcagccgagccccgccacgcgcgccttgcccgcccgccggccgcccccgccgcccccgccgcccccgggccctgatggactgaatgaaggctgcctacaccgcctatcgatgcctcaccaaagacctagaaggctgcgccatgaacccggagctgacaatggaaagtctgggcactttgcacgggccggccggcggcggcagtggcgggggcggcggcgggggcggcgggggcggcggcgggggcccgggccatgagcaggagctgctggccagccccagcccccaccacgcgggccgcggcgccgctggctcgctgcggggccctccgccgcctccaaccgcgcaccaggagctgggcacggcggcagcggcggcagcggcggcgtcgcgctcggccatggtcaccagcatggcctcgatcctggacggcggcgactaccggcccgagctctccatcccgctgcaccacgccatgagcatgtcctgcgactcgtctccgcctggcatgggcatgagcaacacctacaccacgctgacaccgctccagccgctgccacccatctccaccgtgtctgacaagttccaccaccctcacccgcaccaccatccgcaccaccaccaccaccaccaccaccagcgcctgtccggcaacgtcagcggcagcttcaccctcatgcgcgacgagcgcgggctcccggccatgaacaacctctacagtccctacaaggagatgcccggcatgagccagagcctgtccccgctggccgccacgccgctgggcaacgggctaggcggcctccacaacgcgcagcagagtctgcccaactacggtccgccgggccacgacaaaatgctcagccccaacttcgacgcgcaccacactgccatgctgacccgcggtgagcaacacctgtcccgcggcctgggcaccccacctgcggccatgatgtcgcacctgaacggcctgcaccacccgggccacactcagtctcacgggccggtgctggcacccagtcgcgagcggccaccctcgtcctcatcgggctcgcaggtggccacgtcgggccagctggaagaaatcaacaccaaagaggtggcccagcgcatcacagcggagctgaagcgctacagtatcccccaggcgatctttgcgcagagggtgctgtgccggtctcaggggactctctccgacctgctccggaatccaaaaccgtggagtaaactcaaatctggcagggagaccttccgcaggatgtggaagtggcttcaggagcccgagttccagcgcatgtccgccttacgcctggcaggtaaggccggggctagccaggggccaggctgctgggaagagggctccgggtccggtgcttgtggcccaagtctgcgcgccgagtcacttctcttgattctttccttctctttcctatacacgtcctctttcttctcgtttttatttcttcttccattttctctttctcttccgctcttcccctactttcccttctcccttttctttttctttcttactctctccttgtccctgagctttcattgaccgacccccccccatttcattcgccctcccctcaatgtgccaacctttgccctatttccgatcttcccaggtactgggaggcgggatgggggtgtgcgttttcctctaggagccctgtctttccaagacccacagaaaccaggacctgcccttattcaaaaccccatgcacttcaagtctcttttagacaacacatttcaattttccgggctgactagtctccctgtgcagaggcagttgagaggctttgctctgcagagggaaaagagctctctactctcccacccaccatataggcaaacttatttggtcattggctgaaggcacagccttgcccccgcggggaaccggcggccaggatacaacagcgctcctggagcccatctctggccttggcgttggcgcagggactttctgaccgggcttgaggggctcgggccagctccaatgtcactacctacagcgagggcagggtgtaaggttgagaaggtcacattcaccgctttgggaggacgtgggagaagagactgaggtggaaagcgctttgccttgctcaccggccgtccttgccccggtcccagcgtttgctgggatttgccaggatttgccggggctccgggagaccctgagcactcgcaggaagaggtgctgagaaattaaaaattcaggttagttaatgcatccctgccgccggctgcaggctccgcctttgcattaagcgggcgctgattgtgcgcgcctggcgaccgcggggaggactggcggcccgcgggaggggacgggtagaggcgcgggttacattgttctggagccggctcggctctttgtgcctcctctagcggccaagctgcgaggtacagccctctattgttctaggagcacagaaacctcctgtgtgggcggcgggtgcgcgagctagagggaaagatgcagtagttactgcgactggcacgcagttgcgcgcttttgtgcgcacggaccccgcgcggtgtgcgtggcgactgcgctgcccctaggagcaagccacgggcccagaggggcaaaatgtccaggtcccccgctgggaaggacacactataccctatggcaagccagggtgggcgacttcccatggatcgggtggaggggggtatctttcaggatcggcgggcggtctaggggaacaattcgtggtggcgatgatttgcatagcgcgggtcttgggatgcgcgcggttccgagccagcctcgcacagctcgcttccggagctgcgagctcaggtttccacccccgatcccccgggctttcctcgcaccgctgagcccagcttgtggggtgcactcgaccaacgcccgacagggctggggaatgtgacaggcagcaggttcacccgggcttggggagggggagtttccgctttgacagcattttcctttgccgtctgctggtggattcctattcccagtcggtaatcgccccgcagtgttgatctaagaaggtaaagaaaactaggtttccctgcaaagagcctcccccaaatcggcggactccggatactttgagtggatttagaaatttatgtaatctttctcctttagtttatttttcatcctctcctacagttttctctgatttgctgttggttcggggcaagataaagcagccagtagagagcgataataatagcggcgggaaatgaactggagactggctgacagttcttaacattttgtcatagatccccccgaatgtcccaggctgtctctggtgggttttagtacccgccggcttcttgggcaccggggaccagaaggaacttggcagctggtcttaggggtacagttaaaggcaggatgacagctattctcctgctcatctcagagcgctgccgccccctcatgccggtcgcgcaaagaacacagcttttaaaaaacacgtgccttctgcccatataggtctgaaagtgatgaggaaagtaatgcttcgcctattagcgagtttcagcttttaaaatgatcccaagcgttgctgagatgagaaagcgtggcatcccgggggtcctcagccccacccgcgcccatggtgcaagtctgcagggacaggcccgggacagcactgcccacgctgctagattttccgcagaggatcgctgaagctgccttcgtgggagacagaatgcctcctccagcgagtggaaaaggcctgctgaggaccccgctttgctcgagcattcaaatgtgtgtctgttttattaccctgggttgaaaagggacaagagctttagcctttttatctggccattttatcagcaactacaagtgtgttgagtggttattattacataggaggcttttcagtttggggtcagtagatcagtctcttcagacactgatgcagaagctgggactggtaagtaggtattatgtgctcggagcgctaggggacaggagcaaatggagaagaaaagcggaggctttctccgcccggagtatcgatcggaatccccgccggtacgccgcagagggccctcgccgttgggccccgggggtttaacaagcccagccgctccgcaggcggctcggccggactctcagaccggtgcctggaagacaccgtccctgcccccctcccgccaaacctgcctcttctctttctctcataggttataggttccctttctctctcattttggccccgcccccgggtcctgccaaacagccaagcaggccggggtttagggggctcagaatgaagaggtctgatttggccagcgccggcaaagctcacccttaggcgaggtcacaacagaggcaggtccttcctgcccagcctgccggtgtagtcacagccaagggtggcacttgaaaggaaaagggagaaaacttcggagaaatttagattgccccaacgttagatttcagagaaattgactccaaatgcacggattcgttcggaaagggcggctaagtggcaggtggttgcaaccccgcccggtcgggccttcgcagaggttccccaagaccagcccttgcagggcggttttcagcaacctgacaagaggcggccaagacaaatttctgcgggttcgagcacacactctcgggcgttgggccccagagacctctaaaccaagcacaaacaagaagggagtgagagaacccaggctagaacttgcacgggcatcccactgaggaaaagcgaggcctcggtggcaggcatgttttcttccgacgcccgaaaatcgagccgagcgcccgactacatttactgcagaggtttccgcctccagtgagcccggatcccccagcggcctgcccggagctggtctccagtccccgccgtagtccgacgcacggccctctcctggcagcaagctcccagcggccagtctgaagccaattctgttcaggcggccgagggcccttagccaacccaccatgatgtcgcctgggccacctgatgcccgcagcggcgggacacggcccgggcagtgcgcagtggctcctgctaggggcaccgcgtgcgtgcttgtctcccgctgcgccggggacgtccttgggtgacacgggccgctgggcacctcccaagccgaggaaacggacccccttcgcagagtctcgcgcccaccccccaacctcccacctcgtttctcgctgctagggctcccgactcagcccacctctcctggcggtttagttagggatcagagctggagaggctgaacgcaacccgtgccagtacggaacagacgatatgtttgcctgctagctgcttggatgaataattgaaaagttcgctgcagtctgtgcttcgtcaagtcccgggtgccgggagaacaccttcccaacacgcatcagggtgggcgggagcgggcagaggaggcgggacccgagggaggagagtgaacccgagcaggagaagcagcccaggcagccaggcgccctcgatgcgagaggctgggcatttatttttattccaggctttccactgtgtggttatgtcactttctcaaacaaatgtgtatatggagggagatcgatgctgataatgtttagaagattaaaagagcattaatgctggcaacaataacgtaaacgtgtggacccagatttcattgatctggaacttgatccggcgcgtttccagtaagcccgacggcgcgctcttcccagcagagcgctcaccagcgccacggccccgcggttttccagcggtgccgcttcgccagctctgcgcgggttctcccgtctgaccgcagctcctcccccgcgaggccccagcccgccttacttccccgaggttttctcctcctctcgcggggctctctgccctctgcaccccctcccccgacctctgcaccacccgcccctgtgcgcacacaccgctacttgcgcttccggcgatccgcctgggcggctgggtccgcgaagccaatgcgctgaacggtgcccgagtcttcctaactatcctgtgcttggccgttgccactgggccctggtgactaagcccaagtttgaaaatgacgtggctaaagctgcctgctaacggcagagcttaatcagccgcagatcccctcctatcctcatcggttctcgtactaaaaaggctcacgcgcagactttttacgcaggtgcattcgttggacaattaaacgtggccctagtaacaaaagcctgagcttcatccctccgagtagcaggctctgcgctggactggtcgggtctaacagggagaatcttgtgtcctaccttggctgggacaggaagtaagagaagcaaactggggaacccctgccccaccccttcccaccccctggacgtcctgggccgaggcccgggtcactggcccatcgcgggtaaggaggtgtcctgtggaacacctgcattgactggaaaagaaagaactttaaagctcttccttcccgcttgtgggggacaccaccacaccctgccaaccactcccctggccaaatggtggcttgtttttccagaaggagcactaaggtgaattttatggaaaaaaaataaaagatcagggacctaagtgggagtaggatgagaactaattctt

SEQ ID NO: 73 - DNA, 4453 bp, Homo Sapiens
ttggctctgaagcctatagcatcgctgactcagtctgtcccctggaaggctggcagctcagcaagcacagaagtctctccagaagacagtgggtcacctgcctcccaaaagctgaaaggctaacttgtactttccccagcaggcagctggcaccctgagccctcggctggggcagagcaaaggagccttcctccttcctaccttcctggcactctccctgccttccttctgtcactctcaggtggacccagacccaaggtccagatttgcaaggcaggaaaatgctgcaggcctaggctgggaaagggcccaaagccgctagtggattgctgggactcagcctcctccttcccactaagagagcgagtcctactgggttcaaaatgaccccaagccctggttcctgacactaggggaaagagatgggggtgacagaatcacagaatccctgctatgttcctccaagtgtgcccagagatgcgtgtgtgtgtgtgtgtgtatacacaaatgtctgcttatcctcaggcaggaagggtggatgcagtcatttacacatggtctgtttttctggaggacaattttatttgataaacaattgtttctatctgaatagaataaacaaggctctatgatgaagtaaaacactaaatacacatgcattaaaaaatgcataattatctttttggaatgggctatacagagatgtgctttttaaaatgttaagagtgtaaaaggacaaacagtgaaaaataaatcttcctcttattttgtcctccagtctcccaattcctctactcagaggtgagaacagaacttccacaccctccagaacctccacagttagaactgtctacatgtttccattgtctttacttttattcttgcctgcacaaataaatgaattgctcattatggaaacttcccaaaagacccgttaacacttcaataggaagcaccaacagtttatgccctaggactttgttcccacaatcctgtaacatcatatcacgacacctaacccaatccttatcaagccctgtcaaaaacggactttaaaccaagctgcaaattttcagtaatctggccttgcctttccccctctgatagcaccatcaaacaaacccccttactgccgaaagcaataagcccggctttgttccatccactggttgtgttggtgatatctggggactgccactgaacagacgcacagagggagcccctacaggcaggggtttttctgtctgtgcttctgggagagtatgtctcgtacatttgtcgcgttgatgaagacttcacagctccatcagctgcgggcaagggggtctgaggcagtcttaggcaagttggggcccagcggggagaagttgcagaagaactgattagaggaccccaggaggcttcagagctgggcgaggtagagagtctcctgtgcgccttctctcctctctgcaattcggggactccttgcactggggcaggcccccggccaggtgcatgggaggaagcacggagaatttacaagcctctcgattcctcagtccagacgctgttgggtcccctccgctggagatcgcgcttcccccaaatctttgtgagcgttgcggaagcacgcggggtccgggtcgctgagcgctgcaagacaggggagggagccgggcgggagagggaggggcggcgccggggcgggccctgatatagagcaggcgccgcgggtcgcagcacagtgcggagaccgcagccccggagcccgggccagggtccacctgtccccgcagcgccggctcgcgccctcctgccgcagccaccggtgagtgccgcggtcctgagatccccgggccggatgcgcggcggccccagctcccgagcgtctgcctcccccgccctgggctgcccgggctccctgggctccccggcggctgcacggagtcaaggcgccccgtcccgggcgtcccccgcgggtgccgatccaggctgcccggagtccggagcccagagaggagagagacagctggggagcctggtcaccgcgggcatctcccctgcgctgcagtcgcccgcctggcctgccttcccgttcctccgcctcttgccctgacttctccttcctttgcagagccgccgtctagcgccccgacctcgccaccatgagagccctgctggcgcgcctgcttctctgcgtcctggtcgtgagcgactccaaagtgagtgcgctcttgctttgactgatgctgcccaaggacctctgatcagcaccaggggagaggaggggctgctcagggagctggggtcctccggattccatccacagcagggccagactctccccaggaaatgggacagggtggcagcggaggcttgagaaccacgggggttggcactggctggcaagggaggaagaggccgccgggactgccccagcctgcgggcatctggtagatgaagcttgcttgggtcaatccatttctcctggctggaaacccatggtcttccatttgagaactagatacgaacagggtgaggcgagagggagagggaagagtgggttttgggattggggccagtttaccctcaccctggagtccctggagcatgggacctttgatgaagcctcctcccgaatctcttccagggcagcaatgaacttcatcaagttccatgtgagtatccacccctacaacagttggctgcacagacaagttgggaaggcttcaggggacatcccctccctgccctctgctgcagggctgcgccaccccttaccacttccactccccctcgcttaccccacctttgttctctccagcgaactgtgactgtctaaatggaggaacatgtgtgtccaacaagtacttctccaacattcactggtgcaactgcccaaagaaattcggagggcagcactgtgaaataggtatggggatctccactgcaactgggagagaaatttggggacagggagggatgggtgggaggcaagagcaggcaggagttaggagctggaggtagggtgggtgacatcttcatccctatgtgacaagcataaacacacacacacgctcacgaaacagtggccacacaaatgtgaggtggggttggaaggagaccctgtccagtcttctggcaggtctgaaacgacatctttaaaatgtccgttggcagccgggcatggtggctcacgcttgtaatcccagcattttgagaggtcaaggtgagtggatcatttgaggtcaggagttcaagaccagcctggacaacatggtgtaaccctgcctctactaaaaatgcaaaaatcagcctggcatggtagtggatgcctgtagtcccagctacttgggaggctgaggcaggagaattgcttgaacctgggaggcagagatctcagtgagctgagatcacaccactgcactccaactgggcgacagagcaagactccatctcaaaaaaaaaaaataaaagttagttggaatgttcttctctttctcatattctctcatcctcctgtccccttgtagataagtcaaaaacctgctatgaggggaatggtcacttttaccgaggaaaggccagcactgacaccatgggccggccctgcctgccctggaactctgccactgtccttcagcaaacgtaccatgcccacagatctgatgctcttcagctgggcctggggaaacataattactgcaggtgaggtgggggcaacaaggaccaaaagccctccctacagcttcccagaaaccttgttaccatccccttctcccagagggctggccatagcacaagagaagtgcggcctctggttgagtcttccctgaggggaggaggcagggaaggccctctgggttggaatgacatcccctatctttctgtgttgccaggaacccagacaaccggaggcgaccctggtgctatgtgcaggtgggcctaaagctgcttgtccaagagtgcatggtgcatgactgcgcagatggtgagcatcactgacctgctgatgacagtggggtggaaggggacaaacttacatgtccccttattccatcacaggaggactgaggaggtggggggtgcccgagagggatgctttctcctacctgcctccctaagacatccctctgtttgtcctccaggaaaaaagccctcctctcctccagaagaattaaaatttcagtgtggccaaaagactctgaggccccgctttaagattattgggggagaattcaccaccatcgagaaccagccctggtttgcggccatctacaggaggcaccgggggggctctgtcacctacgtgtgtggaggcagcctcatcagcccttgctgggtgatcagcgccacacactgcttcatgtacggccctgggtttctcctcttcgactcttctgccccaccccaagcacatccctttctccttcccagcaaagtgttccgcctcatttctccctcatctgcc

SEQ ID NO: 74 - DNA, 10490 bp, Homo Sapiens
agaaggtgcctgcttccccttcgccttctgccatgactgtaagttccctgaactgggagtcgattaaacctctttcctttataaattacctaggctcaagtatttctttatagcagtgtgaaaacaaactaataccccttccctgaggcgccttctccttaggcaacccgctgcccccatgctcctcctctgccccctgttctttcttttcccctcatgaggcccaagtgataaacggggccagccccagtcccagccccagccccagccccatcctactgcaggcctgtgtggctgctggagaggccgtgttcctttcctctccccgagcctgcctgatatgctttctggatcctggaggaaactgaccccctattctcatactggtgcaacatcttccaagacctcaaagctgtaccatttgagccagtcttttttcttatctccacttgctagggctgtcattgggacagtcctagagggtggtgccaatggatgaatggatggatggacagtagtccagggatgatgtccctgtctgtcctgaaccgggcctttcctccaatgagaagccttcctgagtgagtatatacagtcatcccttggtatccatggaggattagttctagggtccccgggaatgccaaaatccatggatgctcaagtctctgatataacgtggcctagtatttacgtataagctatgcacatcctcccgtatacgttagaccgttactagattatttatgatgtgtaatacaatgcagatgctacataaatggtcgtgatactgtattctttagggaatgatgacaagaacaaagtctgcacatgttcaatagaaacataaccgtccaatttattttctgaatattttccatctgctgttgctgaatctacagatgcagagctcctggatacgagagccaagtgtgctttgagagtagggtgggtgaggttgctaatgagtacaggggagcaggtgttgatcaggaggaccctgcactggggcatctggacgtcctgcctcaggacttgagactccagttggatggcacaggtagactcagcccaggtcaaagccgtccccttgaagtttctttttatcccaagctctttctggaccctggaattcggcatcccctaggccctgcgtggaaggacagatgaaccaggttttagataacatgtctagaagagtgagcccctactgtgtgcccggcactttccccacaggatcctctagctagaatatccaagggtcatggagagaaatacccagttaaaatatcagaaaagaaaaagtgataccattagagacactaaaaagaccattaggtaatagtattagcttttgtattctgagatccaatagcagcagtcacttccctccaccgctatgtgtatcccaggaccaccctgggcggggagggctgcggttagggagcagccatggatgctctgatgctggccctgggcctcgggggtgacagtgatgaggaactgggtgcacacatgagtggggcagccgggcctggccagagaagcagcacacacgtgcacagacgtgtttacccacatacacatgtgcacgcacgtgcacaaacacattgcaggcaggcatgttgacgcctcaggcagcggaggaccctgactctgggcgctgctgacccgggcaaggccccactgtgattcgtgccatgacctcagaatgtcactggtgcttagcacctgtctgctctctggcctgcctcagtggtctacagcagttacacacaggcagtggtatctgtgagcagctctgtggactcaaaggttttctccctgagaggcatgacccaggccagctgattcatcagaatcaggtgagcgtgacctgctctcttccctccaggcggacttggggacagtggctacggtgcgggcggtgttggcctctgtggggcagctaccgaggagggtcatccctgagcactcaccaggcgcccgttctacactgcccgtgtagacgattggctctttcgtctccatggtggcttcgtagagtgggtgctgttcccaaatgtccccattcgacagatgagacgtctggggtcagagaggcagtaaccggcctgggaatccggacatgaccctgagttttgctctcagccctgccgtgtgctgtgctggaattcaggcctgaaccctgtgacctccctgccctagatcccaaatctgcccaggtttcccatcccgatggggcagagcctggtcctggcagagccactggtatagagccactggtacagatccactgacggtcctcagaacacctctgtgccctaagctgggtcctgatggtcgctgtgggccccactgaacacacatggtcccttgtccaggggagcctgctgcccttgggcagctgtggaaaatgaaggagccctggagggctggctgaggggagactatcttcccttgtgttcaaaggggtccgggcactagggttctccccaggtatttcttgctctgcgtggtcctcttgaggcctcgccctccttttgcctcgagtattcccaggagggacggtccatccagctgttctccaggaccaaggacccactgttcttcctcagtgacccaggaaaatgaagcctcctcctgttgggacggctcagaatggtggactccacagtccctccgcgagagacgtggtttccatgcgtacaatagatctttctcatcccccaaacccaacaccctcctgctcaacaggcgttattcctaaagtggcttcactgttcagactgaagagccacggtagccaaagtgatgagcggagtagaaccgagcagtcgggagagatcttgttccctgtaggaaactgggcatcgctgaggccctgagcatcccaggaggccgattgcacagagacctctggtcgctgaccccagtctgcctccacatccctggaatagcccatcatgggcccttcacccttggcaggtggaaaccattcaacctgctggggccggtgtgtccccatttcatggcattgggggacaacaggattctctgtctaggtcccactgtactcaagtccttgggaagatgcccacccctgcttgggacttgagactccagagactggagcagctgtgggccactgggtctggcccctttttccctgggggcggcggtggaatgggggttacgcagccagccagcatctgggagcccggcgagagcggttcaggtgttctccgaagccgccgcgtacagtgtgacctttagacaattctgtctcacaggatggacgtggtagaggtcgcgggcagttggtgggcacaagagcgagaggacatcattatgaaatacgaaaaggtacaagtcggtctgcttcttggagggaggcctcttccagtgtgccctggtcaaagggtcctgggctccctaggagcacagggcagggacgggtggccaatgcccccaggcccttgcaccctttaccttggacccctcaccaaggctccctctgggctacagggacaccgagctgggctgccagaggacaaggggcctaagccttttcgaagctacaacaacaacgtcgatcatttggggattgtacagtgagtcctctgcactcccctcacccctaaagcacctgtctcagctcagggatgggtttgcttttagaaaggcctttctgacgcaggacatgtctcaccaggtcgggtcaacctcctttccagggacagaactcctccctgactcccctgcaggtccagcccgaggttgttaggccagaggtgtggggcccatctagggagccggtgggaatggagactgggctaggtcaggcccctgggcgctcagcagttctgtcggcaagtgagcacaagaggagcggggcagcctgagggtctggccctgtctacttggagacaaccccggtgagatgcaagggttatggccacagggtgaggggacgcctggcccagcctcagggctgttgtccagcaggtctctgagggcccacctgcccctgttctcccccattcccctagagctacagccctcactgtcccgtgaggggaaaaggcatggtgacaatgggggctgtagccctaggagaacgggggagaagatgggcagggccccgttctgggcatctcacggtgaggccagggaggcagcagggctcgcggctaaagacctgggtctggtgctgggaagggatctggggccgggtaagaggagcccagccaggagcccatccctcagggatcacaggatggagagacagaggatccctggggaggtagggcgggagggagctgacgagccgtgccacttctgaaacgcagggtgtgtggctcgggtgcagggagaggcaggtggatgctgggaggtcagaacctgcaagggccttggggctgtcaagtggggtgggcccctggtgcagccagagtacaccgggcaggtctcagggcaggctcccttgaccctggcggggggatgtggtcactccctgagggactcctgtcagggcccggtcgcccaccctgggcggcccccatcccatctcagggctaacctttctcagctccagcagaaagcaccacctcgagtccaggacgggcagccccactgggcagcctgaccgccccccacgccaggggccccagtaaccccggccaggctgtccctacactccttcttctcccaggtcctgcccctcctgggagtcagccccacaggaaggcccttgtcctcccttccctgtgccttctcctgggctgagccctgagctggaaagggacagagccagtcctttctgggggtcggcacccaggctggggccgctccaggccccgtgcagttcctcagctctgcctgggttgccttacagtgagacggagctgcctcctctgactgcgcgggaggcgaaggtaagagcctgatgcgtggaggggctggtccagggacgtagggactgggcgggtggtcagtgaggcagaggaagcagctggcctgagcggtggcgggtgagggcaacacgctgtcactgggaggggcagcagtccctgctggacctgaccccaggttgctgttcactttggcagtttgataaaattccaaaaggagaaccacagtcctggcttgggggtggctgcgcgcttgtgtcaggaccccacctagaggctgggacctaagactggtgtgtctgtggcctgaggatggtacatcccggggtcccaaagccagcccactggtgctcatttgctcaaaggctctcagcccttgaggtctgcccttccctggctccttccagctggctcccaccagggctccagagcccaagacccagcatccgcgggcggctctgggaagcctggcagctccgctaactccaacatgcctcatttgacagcaaattcggcgggagatcagccgaaagagcaagtgggtggatatgctgggagactgggagaaatacaaaagcagcagaaaggtaacgtgtggagggaggaagcactctctgcagagacaggggacaggcacccatggctgtggcctggcaccatcagcctctcagagggtgggcggcacactgtcctcgcccagaggactgcaggcctggtcgccagatttcctgcctattcgtgcaagcgtcaccttgcagggagggaatctgaatctagggctgggactacccggagctcaaggctagggatgccctggtgacctgaaggaaggaaaaggttcagatcagagtttcgactctgagtgtccatccactctttcagtcctgggaagggagaccctgtcccagcttgatctcacctctactgaggaatcatggggccaaaaccgacaatttccagaatccccgggctctggtcctcactggggtcaccccgtggcctgtgacaccagatcgttttctgcccacagctcatagatcgagcgtacaagggaatgcccatgaacatccggggcccgatgtggtcagtcctcctgaacattgaggaaatgaagttgaaaaaccccggaagataccaggtacgctcagccagagcacaacaaacaggacaggccgtgtcggggcccaggtctccagctggagggaacgtcaagaccaccctggggagctgggggtgaaggtcagatgaacaccctgggcacagatggtgacacagtcaccacagacaaactcagctctggtgaccctccctggcttcagtaacaagccaaaatgcagctttctgcagaaggaaaccttccttctgtccttccttcccgaagtgctgactgtgggctgactgccactgggggcagggagtcttccatctgttctgagactgcttcctcctcttggccctgccctacagatcatgaaggagaagggcaagaggtcatctgagcacatccagcgcatcgaccgggacgtaagcgggacattaaggaagcatatattcttcagggatcgatacggaaccaagtaagcctacgggagccacagggtcccagcagagatggggtgaatgagagggatgggggcttccccggagcagaagccagggtcacccaggagggatgacacagctgccaagagctctcccggcccagggagcagccggcaccatgaaccgagcacctccctggttccaagccctgggccagactggaacatgtggggccagaacccaggaggatcctgaggagatggaaggcagcaaacaaaatcatgcacaatggtgaagggtgctctccctgacccatggggacccatggtaggacccacgggagggtggcaggatagagggcccatgagccccccccaggcaacagtgacagcaccaaatgctgggagaattaggggtcctggaaactctcatccaggtccgctgggaacatgacatggcacagccacgttggcagcccgttgggcagtggctcacaaagctcgatggacttgaaccacacatccccaaagtgtcacagatattgaacccactgatttgcaaactgacatccacatgaaaccagcatgccaggttcactgcttgactcctcgtcactcacacacggagccttcggggacggccttcaacacggggatggggagagcaaggctggtcctcccttcaaacggaagacccagtgagaaaagggaacgagccggtgatgcccgcacgaacgtgggtggatcctagatgcattttgctgagggacagaagccagacccaataagctaccacagtaggattcccattcctaggccattctggaaaaggccaaaccacagggactgagaagcagtctgggtggccaggggctgacggatcggggagaggctgggtgcataggggccaccctggagacttggaggatgaaggagtcgccccaggaggggctggagcggtggccgggagactctgcacattggtttggaaccgtggaggaactgtacacccacagactgaactggcgtgtgtgcaaactgaaaaaaaaaaaaaaaaatcattcagagtgaaaaggatcaggcaagtcactgtacaactgggctatttgcatgtcacagatgtggattttactgaaacatttcttcaagagtctcaggccctgaagagctcactgcttatctggtgaaacatctgaacctgaaatgggatttgctgttaggctttgtagacaaagtgaaattaacaacatctgcacaaaacaaaccaaagccccctttctctgtttcctaggcagcgggaactactccacatcctcctggcatatgaggagtacaacccggtgagtattcccggcagtgaggttcccgggccatatttccatattgacaggagtgggtgtctggtgggggtgtcgttgcttcttttaaagttagtatttgtgacccaccaggatataggaggtaggatgtcagctcaccgctggcataaacctccaaggaagggggtggtctcaaggggtcaagctgagacacagaggagtcagggcctggactcctggtgtcacctgggcctgaccaccacttctcagaacaagaaatgacgccctcctcctggggctgccccaaagcccaggagcttggcagcatcgcacacaggatggtgctatcagcagacattttggacaaggtgctgaagtgcctgatggacttggctcttgtcatgaaatgaatgtgcatcctgaggaagcctctttttcagaggaagcctctccttcagaggaagcctctccagtcacctctgccctctccaatgacatgagtcctcccaggtgacctcagccctcccaggtgatgtccttccatggtgactctggctcttgcaggaggtgggctactgcagggacctgagccacatcgccgccttgttcctcctctatcttcctgaggaggatgcattctgggcactggtgcagctgctggccagtgagaggcactccctgcagggtaagtgaacagctgccccggggacctcctgcagccagacctggggatggccaccctggccaggtgatcacagctttcagccaaggcaccctccttgtgtcgccagcttgttgggagactttaggatgtctctgctgagggtcccacaggagtccacggctgacccccaaagcccaaatcagacgcctctcatccccatcagcagagggcatctcatcctccccgtggccaccctctgtgtcctggagccacgccctccggctctgattctgtgcagctgactctcccctccctgagagtcctcctgccctccagctgcccgggctcctgctgccatcggtgcccacgaatgggccgaccaagcccaggtggcagcatctccccatcccctgttccctggcccgaccccactaccaggagatgaccgggaagcccagcgcccacccagttccggccaccctgtcgtggcctgaaagtcaggcttgccctttttgcaccctggcccaggaggcctccaggggaacctccagccaggctccagggaatgttcccgccccacctccccagggtaaaggccgcatgttggggtcaccagatgggagggtgggaggccttggggtttgggggcctctccagctgcccagctcttgcagctgatggctccacatcttgggggaaggctctgatttcatgatgggctgggggcttctcaggatttcacagcccaaatggcgggaccgtccaggggctccaagaccaacaggagcatgtggtagccacgtcacaacccaagaccatggggcatcaggtgagtttatggtcccctcagctcttcccagaggccctgcctcccgtggggctgtaggagcaggggggctggagcccctcgtggggctggtgactggctgagtcccagccagggcctgacctgggacgtcgggttctccatgggctgggagttggtttcctttcctgccctggaggagacagaggcacagggatgggggcccagctcccgcagagcagggcaaagggcagtgtgtccaccgggagtgtgggaaggtgacagtgttgtggggagctctggacaccgcccagtgttctgcactaggggaagggtcttcagaggccctggaagagggaggtttttagggcagcccagtggcctgagcacctctgttgcttccatcaggacaagaaagatctatgtgggcagtgttccccgttaggctgcctcatccggatattgattgacggggtaaggaggcatagggagaccctggctcagggaccttccttgccctgcagtgccctgcttccccagcccgggggtctggctcactcccagcccacaggaggctcaggcgggtccccaaaggacacacaagcaaaaccctctgcccaaggggggtcatcccagggccatggctggggctcaggcccagcctcatgggcagactgggccaggacccgacttgagagggctcagggaagcctcaagccctgggcaagcccctctctccaggagccacatccccactcaaatgagtgccccccatgaggagcttcaagaccttgtctgacccagcgtcctggagggctcaggcgaccctcatggggaaggtcactgactctggagactgaagccccagtgtgcgcagctcgagccaccagccccagcctggaaggaccaggttctttcacacctgctgtccccacagatctctctcgggctcaccctgcgcctgtgggacgtgtatctggtagaaggcgaacaggcgttgatgccgataacaagaatcgcctttaaggttcagcagagtaagtctacgtgtgcccagcggggcctggggagccctggggtcagaccccgactggcccgagggcagcttcctcacactgtcctcatgatcctctgttctggcccagagggaggtctggccaggtgggctgggcaggacactgtgacaccgagcccatcccccacatgacccagatgaaagtcgagagtgtggtgagcacttccctgtcc

SEQ ID NO: 75 - DNA, 7001 bp, Homo Sapiens
atgacatcagcaactgtccagtgaggcggatataaaaccctcaggacatgagagggagacgtggtcctcacatcctgatgtgcaaacattacgctcagggaaaatgcaaggtgccccaggtttgtggactttgcatctttctaggtaacttatttattcactttttaatttcaacaaatgattattaaattttactcaatacataaatatttactgagcaccatttgtgtgcatgagaagtgggagctagcatggcaaaagccaggcactgtgccaggtgagagagacccagaaattaaaaccagagaagtcattaataagagtctaaatatctgggcccaggctcatgcctgtaatcccagcactttgggaggctgaaggaggtgaatcacttgaggtcaggagttcaagaccagcctgaccaaaatggtgaagccccatctctactaaaaatacaaaaaattaggcgggcattgtggcacacgtctgtaatcccagctacttgggaggctgaggcaggagaatcacttgaacccaggaggcagaggttgtagtgagccaagatcgcaccattgcactccagcctgagtgacagagcaagactccatctcaaaaaaaaaaaaaaaagagtctaaggatctgatggaggagaaaggcaagaacatgtgcgagacaacgcaaggccatcgtcccagggtgcccagggtaaccacgggggtagggcactccccggagaggccaatgacaagcaggttgaacaaagcaggggggctccctgcaggaggaggttcaccaggtgaagatggagccgcatgggcaaaggccattccagagacccaggtgtgttcaggaggtggaaacccattgcaggtaaggtgagaggaccgggtggggtggtctaggaggagccgacagagggtacaagctgtgaaacagcttgaagcagggcagtgaggaaagggatctagaggaggaagacacgtggacagatggggctggctgggggctgccgcaggatcttatgcaagaggttctaacaccagagcttcaggctctgagctccgcggaatcaaaggtctcagaaagcaacctattaggatctggtggttgacagcctgcagcagggggtgaaagaggagcccagagcaccctccggtccctgtccctgccttggggcataggaggggaggaactcagtctggccacactggctcaggtgagggcgccccaggggaggccgagaggggctgttctcttgtctgctttgctatcagggactgcctcgagatgtctttggagaaagtgttcctggcttgctgggaaggatccgtgttcagctcccgctgcccagcagcttccatgggaaccttgccctcctggggtctggatccatcgcgacgtgaaggtgatcatcgcccacccccgggacactgtgggggtcaagagaggccccgtggtgagggaggatcatcatcctgggggtcgggggggtttcctcctcagggaggaagatttccagccccggtgctctgcctccggcagactctgtcttgcccacccgctttgtctttgtcgcatgatggaaataaatggaaatggtttccacacacgaatgcactaaactgtaatcacaattttctagatttcagttgtaacaggatcatggacctgagtgacccgcaaagacgctctgagccttgagccagagggtgtgtggggtggggaggggagtttgccacggcctctgtgatcccacagcacagggggcagagctgggggctggggtgggggcaagggcgcaggcagatgggcctgggggtggccagcacggggacccacccagttcgttctgtacaccgaggccacttcctctctcgggttccaaagctcccccgctccctgccatgggcttgggggtcttcccactgcagcccaatgctggctgctcttctacgctgcccaagcccacccctcaggcccggtaccccacagcagagatcaagaggtggctggagggcagtgggggcacggacagcaccactgggcgctccctcttcaggcctctctggaaacccttgctttggaaacgtagaaagccctttctcctgcccccaccttgaaactgtacctaataacggcaaataagttattcagctccccacagctggcaaagtgcaagtcgcagatgctgccacacagcatttcctgacagccctagggcagaccgttgatccattctgcaggtaaaggagttgagatgcaaacacttcccaaggaagcaagaatggcctcctcctccactccctagaaggacccagggcaaccgatccacttgacaacaccagggaatatgggttgccagccacgcactcatgagagaggtggctttgactcccagagcatggatcccaggggagcccaggaacctgtaggagagggtctcccagttggccaccactgggacgggcattcgggcctgtgggagagggtctcccaggtggccatcactgggaccggcatttgggcctatctggatgggccttgggagggtctgcccctgggggagatgttggcatgaacagtcaaaagcactattctgagaccccacgccaacacttcctctttgaaacatgacacttgggaggattgtatagtcttcctaacacaggaaaacagccccgactgaaggcagccccctcctcgtcgcacttctcgaaggtctccgggggccctgccaccctgagttactctccacctgcttttgccgatcctgtaaattggatatacttttaagggcctagaacagcacctggcacaaaacaggtgctcaaaaatatgtatgtaaaacagtggctcctggcggaggctgccagagctggctgtggccccacagagcaggaagaagcacgccttacctgtctgggcctcggccagggtgccgagggccagcatggacaccaggaccagggcgcagatcaccttgttctccatggtggccattgcctcctctctgctccaaaggcgaccccgagtcagggatgagaggccgcccgagccccggattttatagggcaggctctgtttgcttaaagagcgttagataacatttgcctaaggaggcccggggatcctctgagacaataatctccactgatttttatcaaaggtgtttcctagacatggtcaagctacatggaaggatttgctgatagacagagacgacatgtggtgaggtcatcttggctgagggatctgagattcagaaagtccctctttcccatgggagtctcctccaacctgaccttaatccaggtcctactcatatctgagaggccctcccgccagggtaaatactgtactcactgcagaagtgattcatagtgagagatggccggaaaaaggcttggccgtgacaacagtggctcacggggtggccaccgtgaccttgcagggggaagggaaggagctcatgaagcccattccgtctaggcctaagctaattcttttacagtggaattgttttaataatgaaattgtaggcctggcgcagtggctcacgcctgtaatcccaacactttgggaggccaaagcaggcggatcacttaaagtcaggagtttgagactagcctggccaacatggcgaaaccccgtctctacaaaaaaaaaaaatacaaaaattagccaggcatggtggcgggtgcctgtaatcctagctactctggaggttaagtcaggagaatcacttgaacctgggaggcggaggttgcagtgagtcgagatcaccctactgcactccagcctgagcgacagattaagtctccttctgggaggggctgggggcaggagggagaaaaaaatagtatatacgagctgccatcaaaaactgacaaagtgaacgtggttcactcccctgtgtctatggggctccctccctccccctcccacaccttcccagttggtcccctggactcctgtattttagaggacagcctcctgctctcctgtaccatgcctcactcccctcccctgctcggagctttctctttcatagctcttattacctcctggtggataaaacaagtgactgacacattatgttggttatttattcattgcactcctccctgcagcagacgggagggcgcatgggagcagaagtcctcatctcctagtgccttgaggtggccccagaccctagaacagtggctttgattggcattcgagaaacagctgttgaagagctgcatgaagaaatggacaacaggagaaatcttttcttcttcagtgagaaattaggccctgaggaaaatgcatgctagcctaacaaaggtactatcttttcttgggtgacctagtcagtacatttctgcagcccctctgggaggggagcctgggccagaatgggggcggccatgttcctcttcgctccatcccaggacccagcccctcctccagggctgccactcctgcaccggggtctccactcctgggccagggtctccaggaggggcctgaccgcaggacccagggaggggccgaggcctggtgtcctctgtggtcagcttaagtttattgaaaacaggacgggggcaccaggcccagggtggtgctcatagtgacggtggttttcgctgctctaatttctcggatcaaaatgggggctcttggaaatgggatgtaaattgcacaatcatttggagaaaaggtgggcagtgttcggtgaggtttaagccatacagattttacagctcagcaaattcttctgtttccaggcctggtctcttaatcccagaaacatgttcatacttgggcagaagaaaacacaggcaaagatattctttttagcattgtttgtaacagctggaaacagggaaagaaggaaggaaggaaaggagggaaagaaaagcaaaataaatattcattaaccagggaaagggaaaatgaacttaaaatacaatgcagtcgtcccttagtacccctgggggactggtttcaggaccccccacccagggatgccaaaatccacaaatgctcaagtccctggtataaaatgacatagtgcgcagaaaccacgtgcatcctctcctacactttaaccatctctaggttagttataatacctgatgcaatacctacacctcatttcattctgcagattctacatagtacttgacttgcggcacacccaagttttgatctttaagatgttgtaaataagattttaaaatactttttttttttgagacagagtcttgctctgtcgcccaggctggagtgcggtggcatgatctcagcttactgcaacctccacctcccaggtttaagtgattctcctgcctcagcctcctgagtagctgggattacaggcatgtgccaccacgcccagctaatttttgtgtttttagtagagacagggcttcaccatgttggccaggctggtctcgaactcctgacctcaggtgatgcacccgcctcagcctcccaaagtgctgggattacaagtgtgagccactgtgcccagctggattttaaaacagttttgatctgacattactggaatccatggatgtagaacccatgaatatagagaactaattgcatacatgtattatactttacatatattatatatgtatgtatgtgagtatctttcagaagatgaaaatgaataaataatgagaaatattgaaaacaaagcgaagtgaaaaaatccgttaaaatggtttgtaaagtaggatatcatttataatgtagatttccaaactatgtgaaacaatgtgatatactgttggaactgcatccagatgaacaaaatgatgacagtgtagacaggaacgagacactgacttcagcatgatgggtctgtctaggaaggaggaagcaggaaaaggtggcggggtagggcgcaaaggggccttcgatgtctccgtaatgttttcttttgttgaagaaaatctgagggaaataaggtaaaaaggttagcatccattaatgaggggcagcgtagattcacggatgttgttctagcattctgtacatgtttgcaattgctttcttggaaagcccagctcctatctccttgggagagctgtgagataactaccaagtgccggagtttggcctcccacattagggttggagcggctggagctgcccccgggactctccgtttctcgggacaagagctttatccctgtgagagtgggcggaacccaagaccacaccatacataaccttatccataaaaacttgttgaagacaattccagtgtggcgagggagagaatgcagaggcaagcgccagtccatcatcagtgggggaccctgtgccagcattttcacagctctgggtcttagttttcttatctgaaagacgcagtggctgggccacaggacatctgaagactccgcacctcagaccctctccggcaggcatctatggccgtgggggcgtctgtggctgtgcaggcattgcttgtttcctgcgcccagccgacctccctgcggtctggcgagagcccctcattttcagtggggggccccgcagccgcccagattccccacaagggggacgcgcagttggggagtcagtctcctcctgacgctccccacctgcccgctgcccctgacctgtgccttggcaggagggggttctgtaggtggccctggagggagggaggagtttgggaggaagtggatccgggctctcctccaggatccctcctgggatcacctgggacaggccacgtccccctctcagccacagcccaggtgggcgtcctctccacacaccatcttccccaggccccagagcagacccctcacccccctgccccagcctggggggtttaccagccgcaaggagacttttacagtcttcactctcctcgcattgcccagatccgctgtggtgaagcccgtttcctgccaggcctctggtcaaaaaagcaactgccaccccagggaccctttacaaggacacccagctgaggccctggggtt

SEQ ID NO: 76 - DNA, 6499 bp, Artificial Sequence
  chemically treated genomic DNA (Homo sapiens)
tattgtatatttttatttataattggtagttaattattgaatatatatagatataaatgtattttaatatattattatttttatttagattttgtgtaatatttaattatttaattatattaataaataaaagtttttagaaattgatgtatttagtataattaaggggtaatttgtttatgattataggagttattttatttatattaatttgatgtgaggagataattaaatttttttttttttataagaaaaatttaatttcgggaggtttaggtaggagaattttttgaatttaggaggtagaagttgtagtgagtcgagattgtattattgtattttagtttgggtaataagagtgaaattttgttttaaaaaaataaataaataaaataaaataaaaagtaaaatttaatttttatattttttttttaaaaatattatattattgaaatagaatagaattttggattttaatgtttttatgttttttgataatgtaaagattatattaagaataatattgattttttgtgtatatgtgtgaaattatgtcgagttgatgtatttagaaaagaaattgtagcgatattgggtatagaatttttaattttaattttttttttgttgtggaatagaaatttagttttattttttttgtttataatatataagagtagataattagatatgaggtgattaaatatataaattgattttatagttattatggaaagattataatatgtttggacgaggtgggggaaagagtttttttttgaattgagatttgaataggttttagatagattaaaaatttatggtttgttttttttaattttttattattgattatttgggagaattaaaatggtttggattataaagtgattataattagtagggtaggtatattaaataaaaatggggtgagtgtgtttggatgggaaaaattggggtgtagagaaatattttttgttttggaggtttcgtttatagcgagtttgaggatgtagatgatatggaatatgagttttattaggatatatatttttttgtatagttttttttgattagtgttgtttattgttttaggtattatttttagttattttgtgttaggtatttaggatagttttgtttaaagtatgattgttttttggttagtgaagaaatagtaaagaaatgagagtttgtttttgaagtttttgtagtaatttaatatttttgtaatgtcgtggtatatgttttatattttttaaaagtatttatttgtagattagaaataaaagagttttttagtatagatagtttgagagatgttattgtagagtgttttgggaggatgggatttttttagatattgacggttttttggagtggtgttggagtttgttgagatagggacgcggggattgttgtggaatagtatgttgtgaaaataggtatagatgggttgttgttacgtatttagtatttggtaggtttaggtattttgtttcggggagatagagtaatagttgttatttttaaaaatgtgatataaatatgattttcgttttttattgtatgtgtatgtatgtgtgtatgcgtatgtgtggttggtgtgtgggtaaataatattggtgagggagttagtagtgtagagacgtagagatgaatttaatgaatttatatttggaggtttttgaaaggagttttgtgtatgtataattaggaagtagaagtgtagtcgtaggttagttttattttttggtggaaatagtaaattatagttttagtattttttatttgtagtaaaagaaatgtatgttgtatttgggaggggtaggagaattttttagaatttggtgggtttattagttagggttgtgtagagaaatagaattaatgagataaatatgttagatagatgatagatagatagatagatagatagatagatagatagatagatagagatgatagatgatatagatagatgatagatgatagataatagatgatatatagatagatatagtaaatagatttatagatatgatagagagagaatgagagagatttatattaaagaattggtttatatgattgtgggggttgtaaattttatatttgtagaatttgttggtaggatggaaatttaggtaagagtggatattgtagttttgagtcgaaagtttatagggtagtaagttggaaatttaggtaaggtttttaggttgtagttttaagaagaattttatattttttaggaaattttagtttgtgtttttagggtttttaattgattgaatgaagtataaatattatggaaggaaattcggtttatttaaagtttgttggattaagtattaattttaattaaaaaacgtttttatagtaatatttagattattgtttagttaagtatttgggtattatagtttagataagttgacgtataaaatttattattataagggaggaatttatatatatattttattgtagtaaaatttttatagtttaacgttttgtattttttttagaaggaaacgttttagtgtagagttgaatatcgtattttttcgtagtttatataaattttatataattttgatttgttgagttttttttgaaaattggataatttaagtgtttatgaaaggttttaattgtttaagaaaatagattgtttgtgtgaattataaagaaaaagggattttagaaggaatattggtatttcgggaagtaggttggggtaaggtttgtataagtgaattagaagttttaggtacgaagttagtatttttgttatggtttatgttagttgagtttttatttttgtttcgtgtttggtttttagattttgtgagttcgtttcgggatagggttacggttaatttagtagagattttggtaaagtatttcgggaatgagagtgagaaaggtttaaagtagttaaggtttaaagataattttcgattttatttttttaaatgttagtttttaagattttaggttttttggattttaatttttatgttattttaaaggttttaaattttagttttagtagttttagtttatagttttaggtttttagagattattttagtaatttttaaatattattttagggatttagttttgatagttaagattattttttttataaaataatcgtagatattaggtgaagatttttaaagttttaaggaaattttaaattttattttgaggatatcgattttattaaagtttcgaggaaattttaaattttatttcgaggatattagttttatcgttaggaatcgggattttaatttatagtattcggatttcgagaatagaggtttcggggttaaatgggttgaatttagtattttatttttacgttttcgggtggatagtaatttttttttatcgcgttttttcgtgggttttaggttttatatttgagggatgtggttttttttttttatattatgttggttaagaatgatttatatagttattatggaatattgtatggagataaggagtggttgtgtttttgtttgaagggtttattttatttatgaggtaggatgatttttaaggtagtgttatttattagagttaaagtttaggtaaggtgtttaggggttagttgtaatatgaagtatattagttaaggtagttttaaagagtattgttagaggaagaatttatatttggttgtttaatgaggttgaaaggtaaatttaggttaagtaggttaagtaaagaggttagtttagtattttgggaggtagaggtaggtggattatttgaggttaggagttcgagattagtttggttaatatggtgaaattttgtttttattaaaaatataaaaattagttgggtgtggtggtacgcgtttgtaattttagttatttaggaggttgaggtaggagaattgtttgaattagggaggcggaggttgtggtgagttaagattaggttattgtattttagtttgggtgatagagtgaaatttcgttttaaaaaataaataaataaataaataaaaataaaaaagaagttagaaagtttatgaaaaatatttggagggaagaagttagtttaagaataaaagtattaggttagggcgtttaagatttttaaggattggttttggttgtgtagatatttaaagagattgtgtaaggttggataggagggtgagttggttaaaaaggtgatttgttaattgtggaattaattatcgtttaatgttttggataattgagtttgattcgtaatggttaggtttattattgtaaattagttttgaagtataaataagtttattaaattattttttttgtttatatttttttttattttttgatttatgtaatttttgtagtttatatttaaataaaaaataataatatggatttgttattatgtatgtcgtggtttatttttaattgtaaagtttttgattatttttttgttatgttgatttttatgttagaagaaaacgttttgttatttattatgagtgtagaaaattgtttattagaaacgattttaaatagtaaaggatgtatatttgaaataatagggttgtaatgaaaaagtatatattttttaattttatttaatatattgtattcgtagagtaaaagatatagaaaagtattttatgttttaaaaatgtaagtttgagagtgaaaaatagagataataaaaatttttttttaaatattattggtggaaaagttttaaagtaatagaaagtatatataaaatgtttgtgaatttttgtgtaataaaattatatatatatatgtgtgtgtgtatgtatatttgttttttttgttttgttttgtttttttttttttttttgagacggagtttcgttttgtcgtttaggttggagtgtagtggcgggatttcggtttattgtaagtttcgtttttcgggtttacgttatttttttgttttagttttttaagtagttgggattataggcgttcgttattacgttcggttaattttttgtatttttagtagagacggggttttatcgttttagcggggttggtttcgattttttgatttcgtgatttgttcgtttcggttttttaaagtgttgggattataggcgtgagttatcgcgttcggttaatgtatgtatatttgtaatttagatttgtaaatgtagttatatttatatttatatattaaatgtattaaaaagatttattaagttttttatagttagtttataaatttttagtttttttatatattcgtattttttgttttaatatgatataatagttaaaaaaatttaaaaattaataattaattaagttttttttttttgtagattatattagttattatttagaaatattaatttattgttttaaaaataatttttttagagatgtttggtatttagtatatgaaattatttataattgaataatataaataaaatagaaaaaagaatttatttttgggatatttgaagaaagtgatttataaatttagtttatttttgagttttattatttttaggaaaatggtttttatgttatttttatgttatgtttgatttgttttgtttgagtttgttttttagaaagattgtgatttttggtttgttgaatatgaaatttatatgattatttttgggaaaaattttttttttagtgattgtaagttaggttttgtggtcgagaagtattagttgtatttggttgattgattgtattattttgtttttatgttgtttataaagatatatttgagatttggtaatttataaaagaggtttaatagatttatagtgttaagtgggtgggggtgttttataattatggcggaaggtgaaaggtatgttttatatggtggtagataagagaagagagtttgcgtaggaaaatttttttttataaaattattagattttatgagatttatttattattataagaatagtacgggaaggatttatttttatgatttaattatttttaattaggattttttataatatgtgggaattatgggaattataatttaagataagatttgggtgaggttatagttaattatattattgatttttattatattataaagaattattttgtagagagaatttgttttttatttttaataatttgtttattttggatattttatataaatagagttatataatatttgttgttggtttttttatttagtgtaatgtttttaaggtttatttgtgttagagtatgtatttttgttttatttttttatattattaaataatattcgattgtatggatgtgttatattttatttgattttttattagttgatagattgttgggtttttttattttttggttattacgaatgatggtattatatgaatatttatatataagtttttatgggtatatgtttttattttttttgggtatatatttaggtgggggattgttgttatatggtaattttatgtttaatattttgagga

SEQ ID NO: 77 - DNA, 6499 bp, Artificial Sequence
  chemically treated genomic DNA (Homo sapiens)
tttttaggatgttaaatataaagttattatatgatagtaattttttatttaggtatatatttaagaaagataaaaatatatatttatgaaaatttgtgtgtgaatgtttatatagtattattattcgtaatagttaaaaagtagaaaaatttaatagtttgttaattgataagagattaaataaaatgtggtatatttatataatcgaatattatttagtgatgtaaaggaatgaagtaaaggtatatattttaatatagatgaattttgaaaatattatattaaatgaaaaagttagtaataaatattatataattttatttatgtgaaatatttagaataaataaattattagagatggaaagtagattttttttgtaagatagttttttataatatgatgaaagttagtgatatggttggttgtgattttatttaaattttattttgaattgtagtttttataatttttatatgttgtggagggttttggttggaggtaattgaattatgggggtgggtttttttcgtgttatttttgtgatagtgagtaagttttatgaggtttgatggttttataagaggaaatttttttgcgtaagttttttttttttgtttgttattatgtgagatatgttttttatttttcgttatgattgtgaggtatttttatttatttgatattgtgagtttgttaaattttttttgtaaattgttaagttttaggtatgtttttatgagtagtatgaaaatagagtaatatagttagttaattaagtatagttgatgtttttcggttataggatttggtttgtagttattaaaaaaggaattttttttaagagtgattatgtaaattttatatttaataggttaaggattataatttttttggaaaatagatttaagtaagataagttaaatataatatagagatgatatagagattatttttttaaaaataatgagatttagggataaattgagtttgtaggttattttttttagatgttttaaaagtaagtttttttttttgttttgtttgtattatttaattataaatgattttatatattaagtgttaaatatttttagagaaattatttttaaaataatgaattaatgtttttgaataatggttgatatagtttataagaaaaaaaaatttggttaattattaatttttaaatttttttaattattatattatgttaagataaaaaatgcgaatatgtgaagaagttgggaatttatggattgattatgaggaatttagtgaatttttttggtgtatttgatgtgtggatatgaatgtggttgtatttataaatttgagttataaatatatatatattggtcgggcgcggtggtttacgtttgtaattttagtattttgggaggtcgaggcgggtagattacgaggttaggagatcgagattaatttcgttaaaacggtgaaatttcgtttttattaaaaatataaaaaattagtcgggcgtagtggcgggcgtttgtagttttagttatttgggaggttgaggtaggagaatggcgtgaattcgggaggcggagtttgtagtgagtcgagatttcgttattgtattttagtttgggcgatagagcgagatttcgttttaaaaaaaaaaaaaaaaataaaataaaataaaaaaaataaatatatatatatatatatatatatatatatgattttattgtataaaaatttataggtattttatatatattttttattgttttgagatttttttattaataatatttagagaaaggtttttattgtttttgttttttatttttagatttatatttttaaaatataagatgtttttttatattttttattttacgggtataatgtattgaatgagattgagaaatatgtatttttttattataattttattattttaaatatatattttttgttgtttagaatcgtttttagtaagtagttttttgtatttatggtgaatagtaaagcgtttttttttgatatgaagattagtatgataggagaataattagaaattttatagttagaagtaaattacgatatgtataataataagtttatgttattattttttatttagatatgagttatagagattatatgaattagggaataaaagaaaatgtaaataggaggggtagtttaatgaatttgtttatattttaagattgatttataatggtaagtttaattattgcgagttagatttagttatttaggatattgggcggtggttgattttatagttagtagattatttttttggttagtttatttttttgtttagttttgtataatttttttaagtgtttatatagttaggattaatttttggggattttagacgttttgatttaatgtttttatttttggattaattttttttttttaaatgttttttatgggttttttgattttttttttatttttatttatttatttatttattttttgaggcggagttttattttgttatttaggttggagtgtagtggtttgattttggtttattataattttcgtttttttggtttaagtaatttttttgttttagttttttgaatagttgggattataggcgcgtgttattatatttagttaatttttgtatttttagtaaagataaggttttattatgttggttaggttggtttcgaatttttgattttaggtgatttatttgtttttgttttttaaagtgttgggttgatttttttatttggtttgtttgatttagatttgttttttaattttattaaatagttaggtgtagattttttttttggtaatattttttgagattgttttggttaatgtgttttatgttgtaattggtttttaaatattttatttgagttttgattttagtgagtagtattgttttgagggttattttgttttatgaatgggatgagttttttaggtaggggtatagttattttttatttttatgtaatattttatgatgattgtgtagattatttttggttaatatgatataaaaggaggaggttatattttttaaatataggatttaaaatttacgaggggacgcggtggaggagggttgttgtttattcgggggcgtgggagtgaggtattggatttagtttatttggtttcgaagtttttgttttcggaattcgggtgttgtgggttgaggtttcggtttttaacggtgggattggtgttttcgagatgaaatttggggttttttcggggttttggtgggatcggtgtttttaggatgagatttagggtttttttggggttttggggatttttatttaatatttgcgattattttatgagaggagtggttttggttgttagaattggatttttggggtgatatttgggagttattggagtgatttttgaagatttagggttatgagttggagttgttggggttgaaatttggggtttttgaagtggtatggagattgaggtttagagagtttgagattttgagggttgatatttggagagatggggtcgagggttgtttttgggttttgattgttttgggttttttttatttttattttcgggatgttttgttagaatttttgttggattggtcgtaattttgtttcggagcgggtttatagggtttgaaggttaggtacgaggtaaaggtaaagatttaattgatataggttatgatagaggtgttgatttcgtgtttaaaatttttgatttatttatgtaagttttgttttaatttgtttttcggagtattaatgttttttttaaaatttttttttttttgtaatttatataaatagtttatttttttaagtaattaaaattttttatgaatatttaagttgtttagtttttaggagaggtttagtaaattaaagttgtatgggatttgtatgagttacggaaagatgcgatatttaattttgtattgaaacgtttttttttgggaaaagtataaaacgttaaattgtaaagattttgttgtaataaagtgtatatataaattttttttttgtgatggtgaattttatacgttaatttatttgagttatggtgtttagatatttggttgaatagtagtttaaatgttgttgtgaaggcgttttttagttgggattaatgtttaatttagtagattttgagtaaatcggatttttttttataatgtttgtgttttatttaattagttgaagattttaagaatatagattgaggttttttaaagaatatgaaattttttttaagattgtaatttagaaattttgtttgagtttttagtttgttgttttgtggattttcgatttaaggttataatatttatttttatttgaatttttattttgttagtaaattttatagatgtaggatttgtagtttttataattatgtgagttaattttttaatgtaaattttttttattttttttttgttatatttatagatttatttgttatatttatttatgtattatttattatttattatttattatttatttatattatttattatttttatttatttatttatttatttatttatttatttatttatttattatttatttaatatatttattttattggttttgtttttttatataattttgattaataaatttattaaattttaagaagtttttttattttttttaggtgtagtatatattttttttgttataggtgagaagtgttaaggttgtaatttgttgtttttattagaggatgggattggtttacgattgtatttttgttttttgattatgtatgtatagggttttttttaagggtttttaaatataaatttattagatttatttttgcgtttttgtattgttaatttttttattaatattatttatttatatattaattatatatgcgtatgtatatatgtatatatatataataaaaaacgaaagttatatttgtgttatatttttggaaatgatagttgttgttttgttttttcggggtagggtgtttgggtttgttaaatattgagtacgtggtaatagtttatttgtgtttgtttttataatatgttgttttatagtaattttcgcgtttttattttagtaagttttagtattattttagggagtcgttaatgtttagaagaattttatttttttagggtattttatagtagtattttttaaattatttgtgttgaaggatttttttatttttagtttgtagatgaatatttttaaaaaatataaaatatgtattacgatattgtagaaatgttaagttgttataaaagttttaaaagtagatttttatttttttattatttttttattgattagaaagtaattatgttttgaatagaattgttttaagtgtttaatatagagtggttgaggatggtgtttagggtaatagatagtattgattagggaagattgtgtaggaggatgtatattttggtggggtttatgttttatattatttgtatttttaggttcgttatgaacgaagtttttaaaataggaaatatttttttgtattttagttttttttatttaagtatatttattttatttttatttagtatgtttgttttattaattgtaattattttataatttaggttattttgatttttttagatgattaatgatgggaagttgaagaagataggttatgggtttttagtttatttaaagtttatttaaattttagtttagagggagatttttttttttatttcgtttaaatatattatggtttttttatggtaattgtgaaattagtttatatatttaattattttatatttgattatttatttttatgtattatgaatagagaaggtggaattaaatttttattttataataagaaggaggttgagattggaaattttatatttaatatcgttgtaattttttttttggatatattagttcgatatagttttatatatgtgtataaggagttaatgttatttttgatataatttttatattgttaaaaagtatagaaatattgaggtttaaaattttattttattttaatagtgtaatgtttttaaagaaaaaatgtgagggttaagttttattttttattttattttatttatttatttttttgagatagagttttatttttgttgtttaggttggagtgtaatggtgtaatttcggtttattgtaatttttgttttttgggtttaagagatttttttgtttaagtttttcggaattaagttttttttataggaaaaaaggaatttgattgtttttttatattaaattagtgtaaatgaaatgatttttgtaattataaataaattattttttaattgtgttagatatattaatttttaaaggtttttatttgttgatgtaattaaatggttaaatattatatagaatttaagtgggaataataatgtgttaaaatatatttatgtttatgtgtatttaatgattagttgttagttataagtgagaatatgtagta

SEQ ID NO: 78 - DNA, 6456 bp, Artificial Sequence
  chemically treated genomic DNA (Homo sapiens)
taagaattttaagttattatttttgtgtatgtaggtagtattagtgttagtaataataagttagtttttttggtaaatttattaaaattaaattttaaatttttgaaaaaattaatatgtttattatgtttttgttagtttagaggtttaattatttgtgggggagggtttataattatgattaattatttatgatttgaaggtatttataaaagtatttgtttttttaagaaattattaaagaattaggtttaagattgtaaaattaattttaggggtaatagtaaattataggtttggggatttaattttgataatttttttttggaaagaaaagaattgttgttaattgtttttattttttgattttgtttgagtaaatattcgtagtttttaaaatttagaatttttagtttggttaagtaagttatggggattaatggttgttttaaggtagaggtagaagagaagaaataggaaggaaataaaaagggaatgaagatttgtagtttatgagggtgatattattaataatttttttaagtattattgaattttatggttcgtgattgagagttttttttgatattttataggttaattatttttaaggatttttttggttttagagtttgtaatgtttgggtttgaatatgatttgttttataaaaaaggttaggtgaattgatttttttttgtgaagttgttttatggtaagagattattaatttgttgaaacgtaaataattttttagatatttgaagtatttttaaatttataaagtgtttttatatacgttattttattttatttttacgattttaataggtaggtgttattattattttaatacgtaaaaataattttagaaaataatgtttttgtttttagtttataagaatatttttttgaaatttatagtatagaatttaagttatgggttagttagaaacgtttagaaatatattaattttaggaggataaattaagagaataggatggattagataaaatttataagtataatggtagaaagtgtgtttttggtataagaatggcgtaagttttgtaaataatagtgttatataggggtgtttttgtagtatttttacgtttggaaggatattatttatttatatatatgataagtatttttaattggatattttataggtaatagataaaataaaataagaattttcgttttaaaattgtagtggtggaatttatttttcgggatgtattaggtgatttttttaggacgatagttgagttatagggggttaaatatattttttttttttttttttaatattataaagagttttaaaaacggattttgttgtttttaataaataaaatatatatgaaaaaaagttatttataggtttttatatataattttattttttaaaatatttatttttttttattagttaggtcgaggtataatgcggttttaattttataattatttattgttttatttatatatttatgattttttgatgttttttagtttgagtttaaattgcgttgggaataaagtatcgtataaattattagtttgggataagaggagataagttaaaattttttaagaagattttgtagatatttggtttttttgagtttgtagagagtttggtattttaaaggttagttttgggtttttttattttgatgattaatgttaaattgtttgattttttataaaaatatttagttgtgtttatttatattattttatttttagcgtatatagtaggtatgtatttgttgaatagaagttttaaatggatgagaaaaaagatatttttgttatatatttttttaagatcgagaaaggtaaaattataatttaatttgtagaagtttttaggtatttttttttaatgtaaagttatgtatttttgtttaaaaaagaaaaggatgatataattaaataatgttaattatataatggggaaattttaggattattaagaaaatattattattttaagttatatatttttatttaatattggttattatataggagagagtaagaattgttgtttttttatttattcgtataatttatttgggaaaagtatgggtagaatatttatgatttaattatattatattttggatttatatttaattttttggagaattagtttaaagagtatgttcgtttagagatataaagtaaaatagatatagggataatagttttggaagaaatttttatgacgttgtttgagattgggtattagtatttaaattttttagattattaggagttatttttattacgtaattttaataaagagaaattgagagtatgattggtaaaaatattatgatgtttttgtattttgttaatttgatttatatttggttttatttataaagtttttattgattattatacggtatttttattttttagttttatttattttgttttttaaaaattttttaacggtatggttacgaaaaatatgcgggggttagcggggtatgttttaggttggtttattttgtttttaaaacgtatttattttttttagatttttttttagggtgggtagggagaaaacgtttttaagttgtatagttgtagggaagtttgtttaggttatgtttttttgatttgtttttcggttcgttgtttggtaaggttatcggttttggttcgcggttttgtcgataaaatttaatttttattttgtaagattaataggtcgcgtaggatttttttagtcgttttttgtttcgtatttttttgggtttgaggattttcggttcggtttttttcgcgcgcgcgaggttttagatggcgagggcgtagttttttggtttatttgattacgttggggtgttcgaaggtttttaggtgttttagtatcgttatttcgcggatggtggagagcggtatgtttttttcgtcggtttgtattcgtacgcgttttaacgttacgaaacggttttcgttttttaagtcgcgggttttgaatatttttttataggcgtttttttcgattttcgttacgtattcgtattgttggttagcgcggtataggtcgtttttttttatgtcgtttggacgtcgttcgtcgcggcgtcgttggggcgggcggggggtgcgtttaattagttggcggtcgtcgttcgtttatttcggggtttttcggagatcggtttagttttatttgtttttcgtcggtttaggcgttcgggcgttggggttttcgtcgttgtagaagttggatggagagattttttcgcggggttggcgtaattttggtgtcgtcgtcgcgaaatttcgtttgtagagtcgtcgtcgtcgtcgtcgtcggaggagcgagtcgattttttttttttttttttcgaagcgaagtttttaatatagatacgattatatagtttttgtttaagcgcgttttagtttagaattattgtatttaaaggaggagacgggaggataagaagaaagtgtaattagatagtttagaagtttttttcggggtttttttagattttttttttttttttttacgaagtttttatcgttatttttcgcgcgtttttgtttttttttaagtcgtttaattttttttggttttttcgagaaaagcgaagttatttttttttttttgtagggttgaagtcgttttcgcgcggagaggttgtaggggtttttcggggatgagcgagcggcgcgggacgtagtggaacgggagggggcgtgtcgagtagtttagagtgtgtcgggagcgcgggggaggggaggcgtcgggtacgttaatgttacggtttaatatttatttttatattattgtgttgcgtcgttatttttttcgttttttgaggttcggacgtgtagggagacggggtttaggggtgtcggagggcgtttaggggtcgcgtataagttggagcggaaggattgtgggtttattcgtgtggggtcgtagaatgtgggtgggggtttttaggattttgtaattcgatgttgggagtgtgcgagaaggggtggttagatatttgtttagaaattgttttttttttttttatttttagtttttttacgaggagatatttaaaaacgattcgtatatataaatggtttttttggggtaaaggagtttcggttggaaacggaatttttttttcggttgggaggatttttttggtggaaattttgggaagattagttatttggtcggggagggttggggtttatcgggggtgggcgagcgagcggttttgggggaggggagatatcgttttttacgggattttaagggtgggagaaaggggtgttcgttataatttcgtttgtcgtttttttaaagaataattttaggaaggggatagtataatcgcgtttcgtttttaagttttaaattgatttcgatttgagtaaaatttaattttttttttaaagggtggggggtggggggttaaattttgcgtttttaggggtgagagagaaggtttttgttttcggggttcggattcgcgaatttttttttatttttaggattttttcgttgtaggtagtagaggtggttgttttatttttttttcggttaaaggttcggtttagtttgtagtcggacgttttcggagttttttgtataataaagcgttagagtagggtattttaattttttttttttatttagtagttatttgggatttagggggttttttttttttagggtcgtcgcggtttcggtaggatttttattacgacggtcgtatgttcggaattttcggggtatttcggaattatttgtttcgtaatcgttggttcgttcgttttttgttaggaattaaataaacggcgcgatttttacgatgagcgggtggagcggatcgcggcgagagtagagtttttggtatttattatatttagaattttttttaaaagtcgaggaaagagtttttagggattgttcgggggtttgagttaggtcgagggttatataggtagtcggggagtcgtcgtcggtcgtttaattcgtttgttttgtatttttttaattttttttcgttcgagtttagtttcgggtttcgtagcgaaggaagcgtcggggacgttttattttcgtagggaattgcgtttgttgttttcgtcgggtttcgtattgttttggttttttttttattcgttttttagacggtcggtttcggcggagagaaacgggagtagtaatgtttttttttttttttttttttatttttttttgttgttgttgttgtttttttacgttggttgaatgtgatttgattttattttaaaaaaagtttgatatagtgttttaatattttcgtattttttcgcgattataaaggttgtagtcgtttttttttgttttttgtttttgttttttgtttttatatttaatgaaattttttatgcgtttttttcgaagtttgttaagtattataagggtcgttattagtatagcgataagaggttatatcggggatcgcgattttcgcgtgtgcgtatacgtagatgcgtttatatgtatacggacgggcgcgttgcggggattagggttgtttattgcggggcgtgtgtttaattttaatattttaaattataaaagtaaatttggaaattatagtaaacgtgcgttttcgcggggttttaagtttgggtattggtcggttgcgtgtatttttttgtgtataatacgttcgtaggaagtttgcgttaatatttatttcgtggaggggaaggtggagtttatatttatattttagcgagttggagagggagttttcgagggggaaatgtaagtatattttttagtatggagtttttagaggtagtgtattttaaattttaaatgtgaattattatgtgagtgttcgagtagagttttagtttcgtttggagaaattgtatgaggcgtgtttcgtgtgggtgtgtgtgcgtacggatacgtggaagtaggatttcggtgtcgcgggtgtttttaggttgggattttttttttttattagataaggagaattttttagttttttaaaattggtttttataattaatttcgttttagttcgtaaggggttaattaaagtcgattttaaggaaatataggttttttttatttttcgttattttttatttattttatttatagttttgtttcggatttcggttaattttttagatttttttcgggattttttatttcgtagtttatttattcgagcgtatagttttttatttgaggggtttagtcgcgtcgggtttttcgagggggttgcgagtgttagtcggtttttcgtacgtgttcgcggtttcgcggagtaggtaattagattttggggaaggagttattagtatttttttcggcgagggggtgggtatagcggcggagggcggagggacggcggagggcgtcgttcgcgtcgttcgttgggggcggacgggggtcgtt

SEQ ID NO: 79 - DNA, 6456 bp, Artificial Sequence
  chemically treated genomic DNA (Homo sapiens)
agcggttttcgttcgtttttagcgagcggcgcgggcggcgtttttcgtcgttttttcgtttttcgtcgttgtgtttattttttcgtcggagagagtgttggtaattttttttttagagtttgattatttgtttcgcgaggtcgcggatacgtgcggagagtcgattgatattcgtagttttttcgggaggttcgacgcgattgggttttttaggtgaggagttgtgcgttcgggtgggtgggttgcggggtggggggtttcgggggagatttgggggattggtcggggttcgaggtagaattgtgggtggggtaagtggagggtggcggggggtgggggggatttgtgtttttttggaatcggttttggttaattttttacgaattgagacgggattggttatgggggttagttttggggagttagaggattttttttatttgatgagagggggagattttagtttagggatattcgcgatatcgagattttgtttttacgtattcgtacgtatatatatttatacggaatacgttttatatagtttttttaaacggaattggaattttattcggatatttatataataatttatatttagggtttaaaatgtattgtttttagggattttatgttggagaatgtgtttgtatttttttttcgaaaattttttttttagttcgttgaggtgtgggtgtgggttttatttttttttttacgagataaatgttaacgtaggttttttgcgggcgtgttatatatagaaaagtgtacgtagtcggttagtgtttaggtttggagtttcgcgaagacgtacgtttgttgtagtttttaagtttatttttataatttaaaatattggagttaaatatacgtttcgtagtgagtagttttggttttcgtagcgcgttcgttcgtgtgtatatgggcgtatttgcgtgtgcgtatacgcgggagtcgcggttttcggtgtggttttttgtcgttgtgttggtggcgatttttgtggtgtttggtaggtttcgggagaggcgtatgaaggattttattgagtgtgaagatagagagtagagatagaaagtagaaggaggcggttgtagtttttgtagtcgcggaggaatgcggaaatgttgaagtattatgttaaattttttttgaaatggggttaagttatatttagttagcgtgggaaagtaataataataataaaaaaaagtggaggagagggggggaaaaggtattgttgttttcgttttttttcgtcgaagtcgatcgtttggggggcgagtggggggagagttagggtagtgcggggttcggcgggggtagtaggcgtagttttttgcgggggtgggacgttttcgacgtttttttcgttgcggagttcggggttagattcgagcgggagggggttggggggatgtaggataggcgggttgggcggtcggcggcggtttttcggttatttgtgtggttttcgatttggtttagattttcgggtagtttttgggggtttttttttcggtttttaaggaaagttttgaatgtagtgagtgttagaagttttgttttcgtcgcggttcgttttattcgtttatcgtgggggtcgcgtcgtttgtttaatttttggtaaaaggcgagcgggttagcggttgcgaggtaggtaatttcgaggtgtttcgggaatttcggatatgcggtcgtcgtggtgaaagttttgtcgaggtcgcggcggttttggaggagggaggttttttaggttttagatagttgttgaatggggagggaaagttagggtattttattttggcgttttgttgtgtagagggtttcgggggcgttcggttgtagattggatcgggtttttagtcggagggggaatggggtagttatttttgttatttatagcggggaggttttgggaatgggaaaaggttcgcgagttcgggtttcgaggatagagatttttttttttatttttggaggcgtaggatttaattttttattttttattttttgaaagggaggttgagttttgtttaggtcgaaattagtttaaaatttaaggacgaggcgcgattatgttattttttttttgaagttattttttaaggagacgataagcgaaattgtggcgaatattttttttttttatttttgggatttcgtgggggacggtgtttttttttttttaggatcgttcgttcgtttattttcgataagttttaatttttttcgattagatggttggtttttttaaggtttttattagggaggtttttttagtcggagagagaatttcgtttttaatcgagatttttttattttaaaaagattatttgtgtatgcgagtcgtttttaaatgttttttcgtagaaaaattgaaagtagaaagaaaggaagtaatttttgagtagatgtttgattattttttttcgtatatttttagtatcgggttatagggttttgggagtttttatttatattttgcggttttatacggatggatttatagttttttcgttttagtttgtgcgcgatttttgaacgtttttcggtatttttggatttcgtttttttgtacgttcgggttttaggaggcggggagggtagcggcgtaatataatgatatagggataaatattaagtcgtgatattgacgtgttcggcgttttttttttttcgcgttttcggtatattttgggttgttcggtacgttttttttcgttttattgcgtttcgcgtcgttcgtttattttcgaggggtttttgtaattttttcgcgcgaagacggttttagttttgtagggaaagaaaagtaatttcgtttttttcggaggaattaggaaggattaagcggtttgggagagggtaggagcgcgcggagggtagcgatggaggtttcgtaaaggaggaggaggggagtttggaggaatttcgaggaaggtttttgggttgtttgattgtattttttttttattttttcgtttttttttttaggtgtaatgattttggattgagacgcgtttgggtagaggttatgtaatcgtgtttgtgttgaggatttcgtttcgaggagggaagaggagggatcggttcgttttttcggcggcggcggcggcggcgattttgtaggcggagtttcgcggcggcggtattagggttacgttagtttcgcggggaggtttttttatttagtttttgtagcggcgaaagttttagcgttcgagcgtttgagtcggcggggagtaagtaaagttagatcgattttcggggagtttcggagtaggcgagcggcggtcgttagttagttgagcgtatttttcgttcgttttagcggcgtcgcggcgggcggcgtttaggcggtatggagaaggacggtttgtgtcgcgttgattagtagtacgaatgcgtggcggagatcggggagggcgtttatgggaaggtgtttaaggttcgcgatttgaagaacggaggtcgtttcgtggcgttgaagcgcgtgcgggtgtagatcggcgaggagggtatgtcgttttttattattcgcgaggtggcggtgttgaggtatttggagattttcgagtattttaacgtggttaggtgagttagggagttgcgttttcgttatttggggtttcgcgcgcgcggggagggtcgagtcgggaatttttaggtttagaaaggtgcggggtagagggcgattggggaggttttgcgcgatttgttggttttatagagtgagagttaagttttgtcgatagagtcgcgagttagagtcggtgattttgttagatagcgagtcgaaagataagttaaaaaaatatgatttgagtaggtttttttgtagttgtgtaatttagaagcgttttttttttgtttattttgaaggagggtttgggggaagtgggtgcgttttagggataggataagttaatttgagatatgtttcgttagttttcgtatatttttcgtggttatgtcgttggggaatttttgaaagatagagtaggtgagattggagaatgaggatgtcgtgtgataattagtgggaattttatgggtggagttaagtgtaaattaggttaataagatgtagaaatattataatatttttgttagttatatttttagtttttttttattaaagttgcgtagtaagaatgatttttggtggtttaaggagtttgagtgttgatgtttaattttaaatagcgttataaaaattttttttaaaattgttatttttgtgtttgttttattttatatttttgggcggatatattttttagattaattttttaaagggttaaatgtgagtttaagatgtggtatggttagattataaatgttttgtttatgttttttttagatggattgtgcgagtgggtggggagatagtagtttttatttttttttgtgtggtaattagtattaaatgaaaatgtgtgatttaggataatggtgtttttttagtgattttggaatttttttattgtgtggttgatattgtttggttgtgttattttttttttttttaaatagagatgtatagttttatattgaaaaggaatgtttagaaatttttgtaaattgggttgtgattttatttttttcgattttgagaaaatgtgtagtagaaatatttttttttttatttatttagggtttttgtttaataaatatatgtttattgtgtgcgttgaggatgaaatgatgtaaataagtatagttaaatatttttgtaaaaagttaaataatttaatattagttattaaagtggagagatttaagattgatttttgaaatattaaattttttatagatttagagagattaaatatttatagaatttttttgggaggttttaatttgtttttttttattttaggttggtgatttgtgcggtgttttgtttttaacgtagtttagatttaagttagaaggtattaaagaattataaatatataaataaggtagtaaatggttataaagttaagatcgtattatatttcggtttagttagtgaaggagaatgagtgttttagaagatgagattatatataaaaatttatagatgatttttttttatgtgtattttatttgttaaaaataataaaattcgtttttggggttttttgtgatattggagggaaaaggggagggtatatttagttttttgtaatttagttgtcgttttaggggaattatttaatatatttcgaaggatgaattttattattataattttaagacggaagtttttgttttattttgtttgttatttatggagtatttagttaagggtgtttattatgtatatgaatgaatagtgtttttttaaacgtagaggtattatagaggtatttttgtataatattattgtttataaagtttacgttatttttatattagaggtatattttttgttattgtgtttgtagattttgtttgatttattttatttttttgatttatttttttgagattgatgtgtttttagacgtttttaattgatttatgatttggattttgtattgtgaattttaggaggatatttttatgaattgaagataaaggtattgttttttaaaattatttttacgtgttaaggtgatgatggtatttatttgttaaagtcgtgagaataaaatgagatggcgtatgtgaaagtattttgtaaatttgaaagtattttagatatttaaaggattgtttgcgttttagtagattgatggttttttgttatggagtagttttatagggaggggttaatttatttgattttttttgtagaataaattatatttaaatttagatattataggttttggaattaagaagatttttgaggataattagtttgtaagatgttagaaaagatttttagttacgagttatgaaatttagtgatatttgaggaaattattgatgatgttatttttatgagttatagatttttattttttttttgttttttttttgtttttttttttttgtttttgttttgaaataattattggtttttatgatttgtttggttagattaagaattttggattttagaggttgcgaatatttgtttagatagggttaggaaataaggatagttgatagtaatttttttttttttaagggagagttgttaaagttgggtttttaaatttgtgatttattattgtttttgggattagttttatagttttaagtttggttttttaatggttttttaaaagggtagatgtttttataagtatttttaagttataagtaattgattataattataggtttttttttatagatagttaagtttttaagttaataggagtataataaatatattagtttttttaaaagtttaagatttaattttgatggatttgttagaaaagttgatttgttattgttggtattggtattgtttgtatgtatagggataatgatttgaaatttttg

SEQ ID NO: 80 - DNA, 6257 bp, Artificial Sequence
  chemically treated genomic DNA (Homo sapiens)
ttatagtagtttttttgattggattaattttttcggatataatagtagggtaggggtggggtttggggagaaaggatatttttaattttgattttaatatttcgatggtttttaaggttgtttgtatatttatttaggtgtaagttttttaaggtgtggtgtgatgaattagtgatttttggagttaggttagcgtatttttttttcgtagggttgtaagttgtaggattgagaggtaggttgattaggttttgggttggatgatggggtgagagtaaggggttagttttgatatatgtttaatttttttttttagttttaagatattttgggtaaattgtttattttagtttttttgatttttattttaattttaatattagtttaagagaaaatagggatattgatggttatttagaagggttgttgtgttttatatatagtaatatttttcgaatgtttgtgatagcggtttaaggaataagttaattttatattattattttggatatttgtataaaattttattttatttttattatatgaatgtgttagggttgtttttttgttttgttttttttttttttttttgagatagagtttcgtttttgttgtttaggttggagtataatggcgcgattttggtttatcgtaattttcgttttttaggtttaagcgatttatttgttttagttttttcgagtagttgggattataggtatgcgttattatgttcggttaattttgtgtttttagtagagatagggtttttttatgttggttaggttggtattaaattttcgattttaggtgatttatttgttttggttttttaaagtgttgtaattataggtatgagttatcgtatttagtcgtgttagggtttttttttgtttaattttttttttttttttgtttttttttttttttttaatggagttttattttgttatttaggttggagtgtagtggtaagattttagtttattgtaatttttgttttttgagtttaagtaatttttttgttttagtttttcgagtagttgggattataggtgtttgttattatatttagttaatttttgtatttttagtagagatggggttttgttatgttggttaggttggtttcgaatttttgatttcgtgatttgtttgttttggttttttaaagtgttgggattataggtatgagtcgttatattcggttaattttgtattatttttttaaagagagttttttaaattatataagttttaggttttataaaatttagatttgttttagtataattaaatttgggattatttattgagtaattattatgtgttaagtattgcgttgagtgtttttagagtattattttttttaattttagtatagtatgttagatgttgttttatagatgagttaattgagattagagatgtttagttatttgtttaaggtgatatgattgatatggaatagagttaagatttttttttttttttttgatacggagttttattttgttttttaggttggagtgtagaggcgtaattttagtttattgtaagttttgttttttaggtttacgttatttttttgttttagttttttgagtagttgggattataggtattcgttattatatttggttaattttttgtatttttagtagagatagggttttatcgtgttagttaggatggtttcgattttttgatttcgtgatttgtttgtttcggttttttaaagtgttggaattataggtgtgagttatcgcgattggttagatttaagatttgaatttaggtttttttggttttagaggtttttgttttttaattttttaggatggtatagtaatttgttttataagaggtgtttgttttaagtgtgtttagtatatggaagtaagtttagaaatgtaagtgtatatttgtaaagaggtgtgggagatgggggggagggaagagagaaagagatgttggtgttttttattttttagtttttgataggtgtttttgatttttttttgattagtatagttgtatttttggttggggtattttaattagaattgttaaatttagtatataaaaataaggaggtttagttaaatttgaattttagataaataatgaataatttgttagtataaatatgttttatgtaatattttgttgaaattaaaaaaaaaaaaaaaagttttttttttatttttatttttattattaggtttaaggaatagggttaggggttttaaatagaatgtggttgagaagtggaattaagtaggttaatagaaggtaaggggtaaagaagaaattttgaatgtattgggtgttgggtgtttttttaaataagtaagaagggtgtattttgaagaattgagatagaagtttttttgggttgggtgtagttgttcgtggttgtaattttagtattttgggaggttgaggcgggaggattatttgaggttgggagtttaagattagttttattaacgtggagaaattttgtttttattaaaaatataaaaaattagttggttatggtggtatatgtttgtaattttagttgttcgggaggttgaggtaggagaattatttgaattagggaggtagaggttgtggtgagtagagatcgcgttattgttttttagtttgggtaataagagtaaaagttcgtttaaaaaaaaaaaaaagttttttcgatgtgattgtttttttttaaatttgtagatttttttaagattatgttttttagatattttaaagattttagaagatatgtttcgggggttttggaagttataaggtaaatataatatatttttttttttgattattaattttattagaggatgtggtgggaaaattattatttgatattaaaataaataggtttgggatggagtaggatgtaagttttttaggaaagtttaagataaaatttgagatttaaaagggtgttaagagtggtagtttagggaatttatttcggatttcgggggagggggtagagttattagtttttgtatttagggatttttcgaggaaaagtgtgagaacggttgtaggtaatttaggcgtttcggcgttaggagggacgtatttaggtttgcgcgaagagagggagaaagtgaagttgggagttgttatttttagatttgttggaatgtagttggagggggcgagttgggagcgcgtttgtttttaattataggagaaggaggaggtggaggaggagggttgtttgaggaagtataagaatgaagttgtgaagttgagatttttttttattgggatcggagaaattaggggagtttttcgggtagtcgcgcgtttttttttacggggttttttattgcgtcgcgcgttcggtttttatttttcgtagtatttcgcgtttcgcgtttttttagtcgggtttagtcggagttatggggtcggagtcgtagtgagtattatggagttggcggttttgtgtcgttgggggttttttttcgtttttttgtttttcggagtcgcgagtatttaaggtgggtttggtgtggggaggggacggagtagcggcgggattttgttttgtggatgtttcgtcgaggtttcgcggtcggcggggttagaggggttcggacgagtttttttatttcgaagttgtggatagtcgagacgtttagggtagtcgggttttggggttttcgggcgggagggggtagttatacggtagcggttcgagatggtttatttaagagattggcgttttttaggtttcgaggggtttcgggaatttgttaaagaagttttttgaaattgtttagaaagttttttcgtaaagggtgtattgcgtagagcgcgcgcgcgcgttttttttttttttgagtttttttaagtttttttaaagtttttttagttggtagttttcgttttcggattggtttgggttggattttttgggggggttttttgttttgttttttttttagttttttttcgtttttttttagacgattttggtttggttgtttttgtttttggcggggtcgggtgtgtgtgtgtgtggtggagtggagggtggtatagtaatttgttttaattagagtcggggaggaaagggtggttcggagggtggttttttgttggggtttgggttgggggcgggggagacgtttgttttgaatagatttttggggttagtttagggattgtgttttgtgatttttggagcgcgtggattatggaggggtgggggtgggttttttggggtgtaaagtgggagagtttttagagaaggaagttaagaaataaggttagatgggagtttagggagggttgcgttgttttgttgttttttttttggtgttgtgcgtggggaagggtgagtgggggtagtgtgtattttgatttatttgtttatttgtgtgtattaattataaaagttaatatatagtttgggttaggtatattttgttaggaattgtttgtggtgttttgtatgtatttttttttaattttagaatatttttatagtggaagttttgttagtattttggattgagtagtagtttagaggttgagtagtagttagtaagtggtggggttaagatgggattttaggtagtgcgatttttaattatgtattcgaaatcgttatatggatgagtgtatttggagtaatgagggatattgttttttgagttattgggttgtaggggagataaaatgaaagtgttttgggagtcgtgggtggtttttataggttagagggtttggggagggagtgggtgttatcgtggttgtgtgttgttcgaggggttttttgtgagtgagtgtatggtcgtgttatttttgtaggtttacgttagggtgttttttagttgtgtggtttttgtatttgtgtgtttgggttttgtgttgttaaatagtagtttttttgttgatttggggatataggttgaattttgttttttgtaggaatttttttaaggtgttgggttagatttgttataaatagagggaggtagttttttatggttacgtttttttgttgaggaagaaggttttttttttttagggagtatatttttgttttttttgttttttagataagtatttttattttttattttttgatgagaagggtgaggttatattgagttgttaggttgagttgttgtttttttttattttgggttgggagttgattagggaatggtagttgttgtagagttggatttgagggttgggttttttggatggggtttttttatgtttttattttttaatttgtattattgattgtgttgtgtaggagttagttaaaaagttattgtatagtttgggtaataaggtaaaattttgtataaaaaatataaaaattagttggatgtgattatacgtgtttgtagttttagttatttcggaggttgaggtaggaggattatttgagtttaggaagttgaggtttgtagtgagttgtgattgtaaatgttttttagtttgggtgatagtgtgagatttcgttttagaaaaaaagtatattatttagttgtttttagtatttagattttatttaaggggtgaggtttggggtaggaatgtgggggaaggggaggtttagggggagttttagaggggttaggatttttttgaaatttttttttagaggtatgggttttataaattgtagtaaatatatttttttaattttgtagaatttttttatattttaattttagtatgatttttttaatagttttttttttttattatatttggggaaagtatttattttatttgttaagaaaaaaataattgaaaagatagggattaaatgtaaaaagaaaaaatacgtggtattttaaagttaaatataaagtatgtttaattttttcgtggtttgggattatttatatttttgttgtatgaatttgttttgttttaatttttaagaaatgtacggtgtattttttatatgttaggtttttatttatgtttttatttaatttttgtgatagttttgtgaagtaggtgtatagatgagaaaatggaagtttagagaaatgaagtaatttatttaaggtttttagttatttagtaatgtttagggaatttttggattttgaagaggaggtattaagaggtggttagagttttattttagttaataataatgggttgaataaagttttaggggtaggtaggtggttagatgggaggagaagcgttttttttgtttaggcgaatgatttttttatttatttttt

SEQ ID NO: 81 - DNA, 6257 bp, Artificial Sequence
  chemically treated genomic DNA (Homo sapiens)
gagaagtggatggaaaggttattcgtttgaataagaggagcgtttttttttttatttggttatttgtttgtttttaaggttttgtttaatttattattgttggttggaataagattttaattattttttaatgttttttttttagagtttaaaaattttttggatattattgggtagttgggagttttggataagttgttttatttttttgaatttttatttttttatttgtgtatttattttataggattgttatagagattaaatgaaagtatggataaaaatttagtatataggaagtatatcgtatattttttaaaagttaagataagataggtttatatagtaggaatatgggtaattttaaattacgagaaaattaaatatgttttgtgtttgattttggaatgttacgtattttttttttttatatttgatttttatttttttaattgttttttttttgataaataaaatgagtattttttttaagtatagtaaagagaggaggttgttggaagaattatattggaattaaaatatgaaggagttttgtaagattaaaaggatgtatttgttgtaatttgtaaaatttatatttttaagaaaggattttagaaaaattttgatttttttggggttttttttaggttttttttttttttatatttttgttttagattttattttttgggtaaaatttgggtgttggaggtagttgggtggtatattttttttttgaaacggagttttatattgttatttaggttggagagtatttgtaattatagtttattgtaagttttaattttttgggtttaggtgatttttttgttttagttttcggagtagttgggattataggtacgtgtaattatatttaattaatttttgtattttttgtatagagttttgttttgttgtttaggttgtgtaatgattttttaattaatttttgtataatataattaatagtgtaggttgaggggtgaggatatgaggaggttttatttagagaatttagtttttaaatttagttttgtagtaattgttattttttgattaatttttagtttaaggtgaggaagggtagtagtttagtttgatagtttagtatggttttattttttttattagaagatgagaggtgaagatgtttgtttgggaaatagggagggtaaggatgtattttttggaagagaggaatttttttttttagtaagaaggcgtggttatagaaggttatttttttttgtttatggtagatttggtttagtattttaagggagtttttgtagaggatagagtttagtttgtgtttttaagttagtagagagattgttgtttggtaatataaagtttagatatataaatataaagattatataattgaggaatattttggcgtagatttgtagagataatacggttatgtatttatttatagagggtttttcgggtaatatatagttacgatgatatttattttttttttagattttttgatttatggagattatttacgatttttagaatatttttattttgttttttttgtagtttagtgatttagggagtagtgttttttattgttttaggtgtatttatttatatagcgatttcgaatgtatggttgggggtcgtattgtttggggttttattttgattttattatttattagttgttatttaatttttggattgttatttagtttagaatgttggtagaatttttattataggggtgttttaggattaaaggagaatgtatgtaaaatattataaatagtttttggtagagtatatttggtttaggttatatgttagtttttatgattaatgtatataggtggatagatgggttaggatatatattgtttttatttatttttttttacgtatagtattaaggaaaaggtagtagaataacgtagttttttttaggtttttatttggttttattttttagtttttttttttgggaatttttttattttatattttaagaaatttatttttatttttttatggtttacgcgttttaaaagttatagagtatagtttttaagttggttttaagaatttgtttaaagtaaacgtttttttcgtttttaatttagattttagtaagaggttatttttcgggttattttttttttttcggttttggttgggataggttgttatgttattttttattttattatatatatatatattcgatttcgttagaagtaggagtaattaaattaaaatcgtttgaaggggagcggggaggggttggaggaggggtagggtagaggatttttttaaggaatttagtttaggttagttcggaggcggaggttgttaattggaaaggttttgagaaagtttgagggggtttaagaaggggggaaacgcgcgcgcgcgttttacgtaatatattttttgcgggaaaattttttgaataattttagagaatttttttgataagttttcggagtttttcggagtttggaaagcgttagttttttggatgggttatttcgagtcgttgtcgtgtaattgttttttttcgttcgagggttttagggttcggttgttttgagcgtttcgattgtttataatttcgggataggagagttcgttcgggtttttttggtttcgtcggtcgcgggatttcggcggggtatttatagggtagggtttcgtcgttgtttcgttttttttttatattagatttattttgggtgttcgcggtttcggggggtaagagggcgaggaggagtttttagcggtataaggtcgttagttttatggtgtttattgcggtttcggttttatggtttcggttggattcggttgggagggcgcggggcgcggggtgttgcgaggggtgggggtcgggcgcgcggcgtagtaaagggtttcgtgggaaggggcgcgcggttgttcggggggtttttttggttttttcggttttaatggaggggaattttagttttataattttatttttatatttttttaagtagttttttttttttatttttttttttttttgtgattgggagtaagcgcgtttttagttcgttttttttaattgtattttaataagtttgggagtggtaatttttagttttatttttttttttttttcgcgtaggtttgggtgcgttttttttagcgtcgggacgtttgggttgtttgtagtcgtttttatattttttttcggagaatttttaaatgtagaggttggtgattttgttttttttttcggagttcgggataaattttttaggttgttatttttaatatttttttaagttttaggttttattttaaatttttttggggagtttgtattttattttattttaagtttatttgttttaatattaaataatggtttttttattatattttttagtaaaattgatagttaaggagggggatgtgttgtgtttattttgtggtttttaggattttcggggtatattttttggaatttttgaagtatttgaaaagtatgattttaagagggtttataaatttgggaggagatagttatatcgaaaggatttttttttttttttaaacgaatttttgtttttgttgtttaggttggagagtaatggcgcgatttttgtttattataatttttgtttttttggtttaagtgatttttttgttttagtttttcgagtagttgggattataggtatgtgttattatgattagttaattttttgtatttttagtaaagatagggtttttttacgttggtgaggttggttttgaatttttaattttaggtgattttttcgttttagttttttaaagtgttggaattataattacgagtaattgtatttagtttaaaaagatttttattttaattttttaaaatgtattttttttgtttatttaaggaggtatttagtatttaatgtatttaaggttttttttttgttttttgttttttattagtttgtttaattttattttttaattatattttatttggagtttttgattttattttttaggtttagtggtaggggtggggatggaaggaagatttttttttttttttttaattttaataagatattgtatgggatatatttatattaataaattatttattgtttatttgaaatttaaatttaattgggtttttttatttttatgtgttaaatttggtagttttagttggaatgttttagttaagaatgtagttatattggttaagaagggattaaaggtatttattagggattggagaatgaaggatattagtatttttttttttttttttttttttttattttttatatttttttataggtatatatttgtatttttaaatttgtttttatgtgttgagtatatttaaagtaggtattttttgtgggataggttgttatgttattttagggagttgagaaataggggtttttgggattaagaggatttgggtttaaattttgaatttggttagtcgcggtggtttatatttgtaattttagtattttgggaggtcgaggtaggtagattacgaggttaggagatcgagattattttggttaatacggtgaaattttgtttttgttaaaaatataaaaaattagttaggtgtggtggcgggtgtttgtagttttagttatttaggaggttgaggtaggagaatggcgtgaatttgggaggtagagtttgtagtgagttgagattgcgtttttgtattttagtttgggagatagagtgagatttcgtgttaaaaaaaaaaaaaaaaattttgattttattttatattagttatgttattttgggtaagtgattgagtatttttggttttagttggtttatttgtaaaatagtatttgatatattatgttggggttaaaggagataatgttttggaagtatttagcgtaatatttggtatataataattgtttaataaatggttttagatttagttatattggggtagatttaggttttgtggggtttgaagtttatataatttgggaaattttttttaagaaagtaatataaagttggtcgagtatggcggtttatgtttgtaattttagtattttgggaggttaagataggtagattacgaggttaggagttcgagattagtttggttaatatgataaaattttatttttattaaaagtataaaaattaattaggtgtggtggtaggtatttgtaattttagttattcgggaggttgaggtaggagaattgtttgaatttagagggtagaggttgtagtgagttgagattttgttattgtattttagtttgggtgatagagtaagattttattgaaagaaagaaagagagtaagagagagaaaggaattgaatagaaaaagattttagtacggttgggtgcggtggtttatgtttgtaattgtagtattttgggaggttaaggtaggtggattatttgaggtcgggagtttggtattagtttgattaatatggagaaattttgtttttattaaaaatataaaattagtcgggtatggtggcgtatgtttgtaattttagttattcgggaaggttgaggtaggtgaatcgtttgaatttgggaagcggaggttgcggtgagttaagatcgcgttattgtattttagtttgggtaataagagcgaaattttgttttaaaaaaaaaaaaaaaaaataaaataaaaaaataattttagtatatttatatagtaaggataaggtggagttttgtataggtatttagagtgataatgtaaaattaatttattttttggatcgttgttataaatattcgagaaatattgttgtgtatggaatatagtagtttttttggatggttattaatatttttatttttttttgagttggtgttagggttagggtgaggattaggggaattgaggtaagtaatttgtttaggatgttttagggttagagagaaaagttgggtatgtattaaaattgattttttatttttattttattatttagtttaggatttggttaatttgttttttagttttgtagtttatagttttgcgggaagaggatgcgttgatttggttttaggagttattggtttattatattatattttggagggtttgtatttggatgagtgtgtaggtagttttagaggttatcgggatgttaggattagggttagaggtgttttttttttttaggttttatttttgttttgttgttgtgttcggaaaggttagtttagttaggaaagttattgtgg

SEQ ID NO: 82 - DNA, 8467 bp, Artificial Sequence
  chemically treated genomic DNA (Homo sapiens)
atgaattaaatttttttttggtattaagaagggatatatagtatttcgagttttgtttttgtttttttattaagttttttttaatagttggaagtggttgaagggggttgttttaaggagattttttgttttttttttgatagttgattaaaagaaaataggttacgttttttaaatttatgtttattttgtttttaattattgtttttttaaataaaggtaatatttgcgtaattttagttagtttgaattttcggaggtaaatagagcgtaatttgttttggaagaattttgttacgtttaaggttttatgtcgggtgttggtttttttgtttttaattatttttttatttcgattcggattgtagaaatttttaattttttgttttttagttttatttttatttttagatttggggttgttaaataacggaaattttaggaagacgtaggtgcggtttttaaagttttggtttgtgagcgtttttaggttggtcggggcgttggtttttttagaaataaggtttgaatatgtaggtgttagttaggattttttgtcgtttgtttatcgtcgtttttttttcgggatttgagagaagcgggagtgtgtgtgtgtgtgtgtgtgtgtgtgtgtgcgcgtgtgtgtgtttcgtgttaggagaaaggttcgtggttgtcgttttagttggtttgtttattttttgtttttaggagaagtttgtttatttgggatattagcgattttttttatttttattttatcggttttatattttttttatttttttttaagtcgttgatgtagaaagtatttggttattttgaaacggtagttttcggaattttagttttgttttgtaatttagtagggtttttcggaagttttataattgagatttatgggtttatcgggtaattaaatgatgttattgtgttaattttgtatgtattattgttgttcgcgtcgttcgtgggtcgtcggtcggtcgtagttcgttggcgacgagggtattatagttgttttgatcgcgtagattatgtatgtttcggtttcgggaatttattatgtattagaatatattagcgtttgtattttaaaaggttaaattattggtttttagttagggattttcggtaagtggtttgttagtgacgagtgtttgtttatattggtatatagcggagttttttgttttcggtttattcgtttttaggaaagttttggggtgaggcgaaggcgattgaagtaatgtttttttttttagatcgtagttgtttaggggggatatagtacggtattttttatcgaatttttttcgttcgttcgtattttagtttttttttttttagcgatttttttatttttttttttttttttttttttgacgtttgattttagtagtaaaggaggtaaaaaaggtatcgagtcgttagttaaatttgaaaagtgcggtttcgttttttttatagttattggtagtttttcgtggaaggttcgtttttcggggtagttgcggtttcggagtggttgcgtttggcgttcgtcgggcgtggtttcgttttaggttcgggagggtaggttggttgtttcggcgagcggtagagtttttttggatagttttcgtttatttaaatagaagacgtcggcgtcggagcgggttcggatatggcgaggttgcgagtcggttcgagcggcggggttcggtgattttttttttttttttcgtttttttttttttttcgtacgtacgtttcgttcgtttttatttcgtttttatttcgggcgagttcgttcgtagttcggggcgtatattcgtacgcgtatttttttttatttattttcgcgttcgtttttattttcgtagtcgagtttcgttacgcgcgttttgttcgttcgtcggtcgttttcgtcgttttcgtcgttttcgggttttgatggattgaatgaaggttgtttatatcgtttatcgatgttttattaaagatttagaaggttgcgttatgaattcggagttgataatggaaagtttgggtattttgtacgggtcggtcggcggcggtagtggcgggggcggcggcgggggcggcgggggcggcggcgggggttcgggttatgagtaggagttgttggttagttttagtttttattacgcgggtcgcggcgtcgttggttcgttgcggggtttttcgtcgtttttaatcgcgtattaggagttgggtacggcggtagcggcggtagcggcggcgtcgcgttcggttatggttattagtatggtttcgattttggacggcggcgattatcggttcgagttttttatttcgttgtattacgttatgagtatgttttgcgattcgttttcgtttggtatgggtatgagtaatatttatattacgttgatatcgttttagtcgttgttatttatttttatcgtgtttgataagttttattatttttattcgtattattattcgtattattattattattattattattagcgtttgttcggtaacgttagcggtagttttatttttatgcgcgacgagcgcgggttttcggttatgaataatttttatagtttttataaggagatgttcggtatgagttagagtttgttttcgttggtcgttacgtcgttgggtaacgggttaggcggtttttataacgcgtagtagagtttgtttaattacggttcgtcgggttacgataaaatgtttagttttaatttcgacgcgtattatattgttatgttgattcgcggtgagtaatatttgtttcgcggtttgggtattttatttgcggttatgatgtcgtatttgaacggtttgtattattcgggttatatttagttttacgggtcggtgttggtatttagtcgcgagcggttattttcgtttttatcgggttcgtaggtggttacgtcgggttagttggaagaaattaatattaaagaggtggtttagcgtattatagcggagttgaagcgttatagtattttttaggcgatttttgcgtagagggtgttgtgtcggttttaggggatttttttcgatttgtttcggaatttaaaatcgtggagtaaatttaaatttggtagggagatttttcgtaggatgtggaagtggttttaggagttcgagttttagcgtatgttcgttttacgtttggtaggtaaggtcggggttagttaggggttaggttgttgggaagagggtttcgggttcggtgtttgtggtttaagtttgcgcgtcgagttattttttttgatttttttttttttttttttatatacgtttttttttttttcgtttttatttttttttttattttttttttttttttcgttttttttttatttttttttttttttttttttttttttttttattttttttttgtttttgagtttttattgatcgatttttttttattttattcgttttttttttaatgtgttaatttttgttttattttcgatttttttaggtattgggaggcgggatgggggtgtgcgtttttttttaggagttttgtttttttaagatttatagaaattaggatttgtttttatttaaaattttatgtattttaagttttttttagataatatattttaatttttcgggttgattagtttttttgtgtagaggtagttgagaggttttgttttgtagagggaaaagagttttttatttttttatttattatataggtaaatttatttggttattggttgaaggtatagttttgttttcgcggggaatcggcggttaggatataatagcgtttttggagtttatttttggttttggcgttggcgtagggattttttgatcgggtttgaggggttcgggttagttttaatgttattatttatagcgagggtagggtgtaaggttgagaaggttatatttatcgttttgggaggacgtgggagaagagattgaggtggaaagcgttttgttttgtttatcggtcgtttttgtttcggttttagcgtttgttgggatttgttaggatttgtcggggtttcgggagattttgagtattcgtaggaagaggtgttgagaaattaaaaatttaggttagttaatgtatttttgtcgtcggttgtaggtttcgtttttgtattaagcgggcgttgattgtgcgcgtttggcgatcgcggggaggattggcggttcgcgggaggggacgggtagaggcgcgggttatattgttttggagtcggttcggttttttgtgttttttttagcggttaagttgcgaggtatagttttttattgttttaggagtatagaaattttttgtgtgggcggcgggtgcgcgagttagagggaaagatgtagtagttattgcgattggtacgtagttgcgcgtttttgtgcgtacggatttcgcgcggtgtgcgtggcgattgcgttgtttttaggagtaagttacgggtttagaggggtaaaatgtttaggtttttcgttgggaaggatatattatattttatggtaagttagggtgggcgattttttatggatcgggtggaggggggtattttttaggatcggcgggcggtttaggggaataattcgtggtggcgatgatttgtatagcgcgggttttgggatgcgcgcggtttcgagttagtttcgtatagttcgttttcggagttgcgagtttaggtttttattttcgatttttcgggtttttttcgtatcgttgagtttagtttgtggggtgtattcgattaacgttcgatagggttggggaatgtgataggtagtaggtttattcgggtttggggagggggagttttcgttttgatagtatttttttttgtcgtttgttggtggatttttatttttagtcggtaatcgtttcgtagtgttgatttaagaaggtaaagaaaattaggtttttttgtaaagagttttttttaaatcggcggatttcggatattttgagtggatttagaaatttatgtaattttttttttttagtttattttttatttttttttatagttttttttgatttgttgttggttcggggtaagataaagtagttagtagagagcgataataatagcggcgggaaatgaattggagattggttgatagtttttaatattttgttatagattttttcgaatgttttaggttgtttttggtgggttttagtattcgtcggttttttgggtatcggggattagaaggaatttggtagttggttttaggggtatagttaaaggtaggatgatagttatttttttgtttattttagagcgttgtcgtttttttatgtcggtcgcgtaaagaatatagtttttaaaaaatacgtgttttttgtttatataggtttgaaagtgatgaggaaagtaatgtttcgtttattagcgagttttagtttttaaaatgattttaagcgttgttgagatgagaaagcgtggtatttcgggggtttttagttttattcgcgtttatggtgtaagtttgtagggataggttcgggatagtattgtttacgttgttagatttttcgtagaggatcgttgaagttgttttcgtgggagatagaatgttttttttagcgagtggaaaaggtttgttgaggatttcgttttgttcgagtatttaaatgtgtgtttgttttattattttgggttgaaaagggataagagttttagtttttttatttggttattttattagtaattataagtgtgttgagtggttattattatataggaggttttttagtttggggttagtagattagtttttttagatattgatgtagaagttgggattggtaagtaggtattatgtgttcggagcgttaggggataggagtaaatggagaagaaaagcggaggtttttttcgttcggagtatcgatcggaattttcgtcggtacgtcgtagagggttttcgtcgttgggtttcgggggtttaataagtttagtcgtttcgtaggcggttcggtcggatttttagatcggtgtttggaagatatcgtttttgtttttttttcgttaaatttgtttttttttttttttttataggttataggtttttttttttttttattttggtttcgttttcgggttttgttaaatagttaagtaggtcggggtttagggggtttagaatgaagaggtttgatttggttagcgtcggtaaagtttatttttaggcgaggttataatagaggtaggttttttttgtttagtttgtcggtgtagttatagttaagggtggtatttgaaaggaaaagggagaaaatttcggagaaatttagattgttttaacgttagattttagagaaattgattttaaatgtacggattcgttcggaaagggcggttaagtggtaggtggttgtaatttcgttcggtcgggttttcgtagaggttttttaagattagtttttgtagggcggtttttagtaatttgataagaggcggttaagataaatttttgcgggttcgagtatatattttcgggcgttgggttttagagatttttaaattaagtataaataagaagggagtgagagaatttaggttagaatttgtacgggtattttattgaggaaaagcgaggtttcggtggtaggtatgttttttttcgacgttcgaaaatcgagtcgagcgttcgattatatttattgtagaggttttcgtttttagtgagttcggattttttagcggtttgttcggagttggtttttagttttcgtcgtagttcgacgtacggtttttttttggtagtaagtttttagcggttagtttgaagttaattttgtttaggcggtcgagggtttttagttaatttattatgatgtcgtttgggttatttgatgttcgtagcggcgggatacggttcgggtagtgcgtagtggtttttgttaggggtatcgcgtgcgtgtttgtttttcgttgcgtcggggacgtttttgggtgatacgggtcgttgggtattttttaagtcgaggaaacggatttttttcgtagagtttcgcgtttattttttaattttttatttcgtttttcgttgttagggttttcgatttagtttattttttttggcggtttagttagggattagagttggagaggttgaacgtaattcgtgttagtacggaatagacgatatgtttgtttgttagttgtttggatgaataattgaaaagttcgttgtagtttgtgtttcgttaagtttcgggtgtcgggagaatatttttttaatacgtattagggtgggcgggagcgggtagaggaggcgggattcgagggaggagagtgaattcgagtaggagaagtagtttaggtagttaggcgttttcgatgcgagaggttgggtatttatttttattttaggttttttattgtgtggttatgttatttttttaaataaatgtgtatatggagggagatcgatgttgataatgtttagaagattaaaagagtattaatgttggtaataataacgtaaacgtgtggatttagattttattgatttggaatttgattcggcgcgtttttagtaagttcgacggcgcgttttttttagtagagcgtttattagcgttacggtttcgcggttttttagcggtgtcgtttcgttagttttgcgcgggttttttcgtttgatcgtagtttttttttcgcgaggttttagttcgttttattttttcgaggttttttttttttttcgcggggttttttgttttttgtattttttttttcgatttttgtattattcgtttttgtgcgtatatatcgttatttgcgttttcggcgattcgtttgggcggttgggttcgcgaagttaatgcgttgaacggtgttcgagtttttttaattattttgtgtttggtcgttgttattgggttttggtgattaagtttaagtttgaaaatgacgtggttaaagttgtttgttaacggtagagtttaattagtcgtagatttttttttatttttatcggttttcgtattaaaaaggtttacgcgtagattttttacgtaggtgtattcgttggataattaaacgtggttttagtaataaaagtttgagttttattttttcgagtagtaggttttgcgttggattggtcgggtttaatagggagaattttgtgttttattttggttgggataggaagtaagagaagtaaattggggaatttttgttttatttttttttattttttggacgttttgggtcgaggttcgggttattggtttatcgcgggtaaggaggtgttttgtggaatatttgtattgattggaaaagaaagaattttaaagtttttttttttcgtttgtgggggatattattatattttgttaattatttttttggttaaatggtggtttgtttttttagaaggagtattaaggtgaattttatggaaaaaaaataaaagattagggatttaagtgggagtaggatgagaattaattttt

SEQ ID NO: 83 - DNA, 8467 bp, Artificial Sequence
  chemically treated genomic DNA (Homo sapiens)
aagaattagtttttattttatttttatttaggtttttgattttttattttttttttataaaatttattttagtgttttttttggaaaaataagttattatttggttaggggagtggttggtagggtgtggtggtgttttttataagcgggaaggaagagttttaaagtttttttttttttagttaatgtaggtgttttataggatatttttttattcgcgatgggttagtgattcgggtttcggtttaggacgtttagggggtgggaaggggtggggtaggggttttttagtttgttttttttattttttgttttagttaaggtaggatataagattttttttgttagattcgattagtttagcgtagagtttgttattcggagggatgaagtttaggtttttgttattagggttacgtttaattgtttaacgaatgtatttgcgtaaaaagtttgcgcgtgagtttttttagtacgagaatcgatgaggataggaggggatttgcggttgattaagttttgtcgttagtaggtagttttagttacgttatttttaaatttgggtttagttattagggtttagtggtaacggttaagtataggatagttaggaagattcgggtatcgtttagcgtattggtttcgcggatttagtcgtttaggcggatcgtcggaagcgtaagtagcggtgtgtgcgtataggggcgggtggtgtagaggtcgggggagggggtgtagagggtagagagtttcgcgagaggaggagaaaatttcggggaagtaaggcgggttggggtttcgcgggggaggagttgcggttagacgggagaattcgcgtagagttggcgaagcggtatcgttggaaaatcgcggggtcgtggcgttggtgagcgttttgttgggaagagcgcgtcgtcgggtttattggaaacgcgtcggattaagttttagattaatgaaatttgggtttatacgtttacgttattgttgttagtattaatgtttttttaattttttaaatattattagtatcgatttttttttatatatatatttgtttgagaaagtgatataattatatagtggaaagtttggaataaaaataaatgtttagtttttcgtatcgagggcgtttggttgtttgggttgttttttttgttcgggtttatttttttttttcgggtttcgttttttttgttcgttttcgtttattttgatgcgtgttgggaaggtgttttttcggtattcgggatttgacgaagtatagattgtagcgaattttttaattatttatttaagtagttagtaggtaaatatatcgtttgtttcgtattggtacgggttgcgtttagtttttttagttttgatttttaattaaatcgttaggagaggtgggttgagtcgggagttttagtagcgagaaacgaggtgggaggttggggggtgggcgcgagattttgcgaagggggttcgttttttcggtttgggaggtgtttagcggttcgtgttatttaaggacgttttcggcgtagcgggagataagtacgtacgcggtgtttttagtaggagttattgcgtattgttcgggtcgtgtttcgtcgttgcgggtattaggtggtttaggcgatattatggtgggttggttaagggttttcggtcgtttgaatagaattggttttagattggtcgttgggagtttgttgttaggagagggtcgtgcgtcggattacggcggggattggagattagtttcgggtaggtcgttgggggattcgggtttattggaggcggaaatttttgtagtaaatgtagtcgggcgttcggttcgattttcgggcgtcggaagaaaatatgtttgttatcgaggtttcgtttttttttagtgggatgttcgtgtaagttttagtttgggtttttttattttttttttgtttgtgtttggtttagaggtttttggggtttaacgttcgagagtgtgtgttcgaattcgtagaaatttgttttggtcgttttttgttaggttgttgaaaatcgttttgtaagggttggttttggggaatttttgcgaaggttcgatcgggcggggttgtaattatttgttatttagtcgtttttttcgaacgaattcgtgtatttggagttaatttttttgaaatttaacgttggggtaatttaaattttttcgaagtttttttttttttttttttaagtgttatttttggttgtgattatatcggtaggttgggtaggaaggatttgtttttgttgtgatttcgtttaagggtgagttttgtcggcgttggttaaattagatttttttattttgagttttttaaatttcggtttgtttggttgtttggtaggattcgggggcggggttaaaatgagagagaaagggaatttataatttatgagagaaagagaagaggtaggtttggcgggaggggggtagggacggtgttttttaggtatcggtttgagagttcggtcgagtcgtttgcggagcggttgggtttgttaaattttcggggtttaacggcgagggttttttgcggcgtatcggcggggatttcgatcgatatttcgggcggagaaagttttcgttttttttttttatttgtttttgttttttagcgtttcgagtatataatatttatttattagttttagtttttgtattagtgtttgaagagattgatttattgattttaaattgaaaagttttttatgtaataataattatttaatatatttgtagttgttgataaaatggttagataaaaaggttaaagtttttgtttttttttaatttagggtaataaaatagatatatatttgaatgttcgagtaaagcggggtttttagtaggttttttttattcgttggaggaggtattttgttttttacgaaggtagttttagcgattttttgcggaaaatttagtagcgtgggtagtgttgtttcgggtttgtttttgtagatttgtattatgggcgcgggtggggttgaggattttcgggatgttacgtttttttattttagtaacgtttgggattattttaaaagttgaaattcgttaataggcgaagtattattttttttattatttttagatttatatgggtagaaggtacgtgttttttaaaagttgtgttttttgcgcgatcggtatgagggggcggtagcgttttgagatgagtaggagaatagttgttattttgtttttaattgtatttttaagattagttgttaagttttttttggttttcggtgtttaagaagtcggcgggtattaaaatttattagagatagtttgggatattcggggggatttatgataaaatgttaagaattgttagttagtttttagtttatttttcgtcgttattattatcgttttttattggttgttttattttgtttcgaattaatagtaaattagagaaaattgtaggagaggatgaaaaataaattaaaggagaaagattatataaatttttaaatttatttaaagtattcggagttcgtcgatttgggggaggttttttgtagggaaatttagttttttttatttttttagattaatattgcggggcgattatcgattgggaataggaatttattagtagacggtaaaggaaaatgttgttaaagcggaaattttttttttttaagttcgggtgaatttgttgtttgttatattttttagttttgtcgggcgttggtcgagtgtattttataagttgggtttagcggtgcgaggaaagttcgggggatcgggggtggaaatttgagttcgtagtttcggaagcgagttgtgcgaggttggttcggaatcgcgcgtattttaagattcgcgttatgtaaattatcgttattacgaattgtttttttagatcgttcgtcgattttgaaagatatttttttttattcgatttatgggaagtcgtttattttggtttgttatagggtatagtgtgttttttttagcgggggatttggatattttgtttttttgggttcgtggtttgtttttaggggtagcgtagtcgttacgtatatcgcgcggggttcgtgcgtataaaagcgcgtaattgcgtgttagtcgtagtaattattgtatttttttttttagttcgcgtattcgtcgtttatataggaggtttttgtgtttttagaataatagagggttgtatttcgtagtttggtcgttagaggaggtataaagagtcgagtcggttttagaataatgtaattcgcgtttttattcgttttttttcgcgggtcgttagtttttttcgcggtcgttaggcgcgtataattagcgttcgtttaatgtaaaggcggagtttgtagtcggcggtagggatgtattaattaatttgaatttttaattttttagtatttttttttgcgagtgtttagggtttttcggagtttcggtaaattttggtaaattttagtaaacgttgggatcggggtaaggacggtcggtgagtaaggtaaagcgttttttattttagtttttttttttacgtttttttaaagcggtgaatgtgatttttttaattttatattttgttttcgttgtaggtagtgatattggagttggttcgagttttttaagttcggttagaaagtttttgcgttaacgttaaggttagagatgggttttaggagcgttgttgtattttggtcgtcggtttttcgcgggggtaaggttgtgtttttagttaatgattaaataagtttgtttatatggtgggtgggagagtagagagtttttttttttttgtagagtaaagttttttaattgtttttgtatagggagattagttagttcggaaaattgaaatgtgttgtttaaaagagatttgaagtgtatggggttttgaataagggtaggttttggtttttgtgggttttggaaagatagggtttttagaggaaaacgtatatttttatttcgttttttagtatttgggaagatcggaaatagggtaaaggttggtatattgaggggagggcgaatgaaatgggggggggtcggttaatgaaagtttagggataaggagagagtaagaaagaaaaagaaaagggagaagggaaagtaggggaagagcggaagagaaagagaaaatggaagaagaaataaaaacgagaagaaagaggacgtgtataggaaagagaaggaaagaattaagagaagtgattcggcgcgtagatttgggttataagtatcggattcggagttttttttttagtagtttggtttttggttagtttcggttttatttgttaggcgtaaggcggatatgcgttggaattcgggtttttgaagttatttttatattttgcggaaggtttttttgttagatttgagtttattttacggttttggatttcggagtaggtcggagagagttttttgagatcggtatagtattttttgcgtaaagatcgtttgggggatattgtagcgttttagtttcgttgtgatgcgttgggttatttttttggtgttgattttttttagttggttcgacgtggttatttgcgagttcgatgaggacgagggtggtcgttcgcgattgggtgttagtatcggttcgtgagattgagtgtggttcgggtggtgtaggtcgtttaggtgcgatattatggtcgtaggtggggtgtttaggtcgcgggataggtgttgtttatcgcgggttagtatggtagtgtggtgcgcgtcgaagttggggttgagtattttgtcgtggttcggcggatcgtagttgggtagattttgttgcgcgttgtggaggtcgtttagttcgttgtttagcggcgtggcggttagcggggataggttttggtttatgtcgggtatttttttgtagggattgtagaggttgtttatggtcgggagttcgcgttcgtcgcgtatgagggtgaagttgtcgttgacgttgtcggataggcgttggtggtggtggtggtggtggtggtgcggatggtggtgcgggtgagggtggtggaatttgttagatacggtggagatgggtggtagcggttggagcggtgttagcgtggtgtaggtgttgtttatgtttatgttaggcggagacgagtcgtaggatatgtttatggcgtggtgtagcgggatggagagttcgggtcggtagtcgtcgtcgtttaggatcgaggttatgttggtgattatggtcgagcgcgacgtcgtcgttgtcgtcgttgtcgtcgtgtttagtttttggtgcgcggttggaggcggcggagggtttcgtagcgagttagcggcgtcgcggttcgcgtggtgggggttggggttggttagtagtttttgtttatggttcgggttttcgtcgtcgttttcgtcgttttcgtcgtcgttttcgttattgtcgtcgtcggtcggttcgtgtaaagtgtttagattttttattgttagtttcgggtttatggcgtagttttttaggtttttggtgaggtatcgataggcggtgtaggtagtttttatttagtttattagggttcgggggcggcgggggcggcgggggcggtcggcgggcgggtaaggcgcgcgtggcggggttcggttgcgggagtgggggcgggcgcgggagtgagtggagaggagtgcgcgtgcgggtgtgcgtttcgggttgcgggcgggttcgttcggggtgggggcggggtgggggcggacggggcgtgcgtgcgggagaggggaggggacggggagggagggagggattatcgggtttcgtcgttcgggtcggttcgtagtttcgttatgttcgagttcgtttcggcgtcgacgttttttgtttgggtgagcgggagttgtttagaagggttttgtcgttcgtcggggtagttaatttattttttcggatttggggcggggttacgttcgacgggcgttaagcgtaattatttcgaggtcgtagttgtttcgggaggcgggttttttacgggaagttattagtggttgtggagggggcggggtcgtattttttaggtttggttgacggttcggtgttttttttattttttttgttattggaattaaacgttaaggagagggagggaggagaaggtgggggggtcgttggggagagggaggttggagtgcgagcgagcgagagagattcggtgaaagatgtcgtgttgtgttttttttgagtagttgcgatttgggggaaggggtattgttttaatcgttttcgttttattttaaagtttttttggaggcgagtaagtcgggagtaaaagatttcgttatgtgttagtatagataaatattcgttattaataagttatttatcgagagtttttagttgggagttaatagtttagttttttaaaatgtaggcgttaatgtattttaatgtatggtaaattttcgaggtcgggatatgtataatttacgcggttagagtaattgtagtgttttcgtcgttagcgagttgcggtcggtcggcggtttacgggcggcgcgggtagtagtaatgtatgtaaagttaatataataatattatttaattattcggtgagtttataaattttagttatgaggttttcgaagagttttgttagattgtaaaataaaattagaatttcgggagttgtcgttttaaggtgattaagtgttttttgtattagcgatttggaaagaagtggggagagtgtagaatcggtgaggtggaggtgaggagggtcgttggtgttttaagtgagtaaattttttttgggggtagagagtaagtaaattagttgagacggtaattacggattttttttttaatacgagatatatatacgcgtatatatatatatatatatatatatatatattttcgttttttttaaatttcgggagagaaacggcggtgggtagacgataaggaattttggttgatatttgtatatttaaattttgtttttgaaaagattagcgtttcggttagtttgagaacgtttataagttaaggttttaaaaatcgtatttacgtttttttagaattttcgttgtttggtaattttaggtttggaggtgggagtggaattgggggatagagagttggagatttttgtagttcgagtcggggtggaggggtagttgaagatagagaggttaatattcggtataaagttttaaacgtaataagatttttttaaagtaggttgcgttttgtttgttttcgaagatttaagttagttgaggttgcgtagatgttgtttttgtttaaagagatagtaattaaggatagggtggatataagtttgagaagcgtgatttatttttttttgattagttgttaaaagaagagtagggggtttttttaagatagttttttttaattatttttagttgttagagaaaatttgataagaaaataagggtagagttcggaatattgtatgtttttttttggtgttagagaaaggtttgatttat

SEQ ID NO: 84 - DNA, 4453 bp, Artificial Sequence
  chemically treated genomic DNA (Homo sapiens)
ttggttttgaagtttatagtatcgttgatttagtttgttttttggaaggttggtagtttagtaagtatagaagtttttttagaagatagtgggttatttgttttttaaaagttgaaaggttaatttgtattttttttagtaggtagttggtattttgagttttcggttggggtagagtaaaggagttttttttttttttatttttttggtattttttttgttttttttttgttatttttaggtggatttagatttaaggtttagatttgtaaggtaggaaaatgttgtaggtttaggttgggaaagggtttaaagtcgttagtggattgttgggatttagtttttttttttttattaagagagcgagttttattgggtttaaaatgattttaagttttggtttttgatattaggggaaagagatgggggtgatagaattatagaatttttgttatgtttttttaagtgtgtttagagatgcgtgtgtgtgtgtgtgtgtatatataaatgtttgtttatttttaggtaggaagggtggatgtagttatttatatatggtttgtttttttggaggataattttatttgataaataattgtttttatttgaatagaataaataaggttttatgatgaagtaaaatattaaatatatatgtattaaaaaatgtataattatttttttggaatgggttatatagagatgtgttttttaaaatgttaagagtgtaaaaggataaatagtgaaaaataaattttttttttattttgttttttagttttttaatttttttatttagaggtgagaatagaatttttatattttttagaatttttatagttagaattgtttatatgtttttattgtttttatttttatttttgtttgtataaataaatgaattgtttattatggaaattttttaaaagattcgttaatattttaataggaagtattaatagtttatgttttaggattttgtttttataattttgtaatattatattacgatatttaatttaatttttattaagttttgttaaaaacggattttaaattaagttgtaaatttttagtaatttggttttgtttttttttttttgatagtattattaaataaatttttttattgtcgaaagtaataagttcggttttgttttatttattggttgtgttggtgatatttggggattgttattgaatagacgtatagagggagtttttataggtaggggtttttttgtttgtgtttttgggagagtatgtttcgtatatttgtcgcgttgatgaagattttatagttttattagttgcgggtaagggggtttgaggtagttttaggtaagttggggtttagcggggagaagttgtagaagaattgattagaggattttaggaggttttagagttgggcgaggtagagagttttttgtgcgtttttttttttttttgtaattcggggattttttgtattggggtaggttttcggttaggtgtatgggaggaagtacggagaatttataagtttttcgattttttagtttagacgttgttgggtttttttcgttggagatcgcgttttttttaaatttttgtgagcgttgcggaagtacgcggggttcgggtcgttgagcgttgtaagataggggagggagtcgggcgggagagggaggggcggcgtcggggcgggttttgatatagagtaggcgtcgcgggtcgtagtatagtgcggagatcgtagtttcggagttcgggttagggtttatttgttttcgtagcgtcggttcgcgtttttttgtcgtagttatcggtgagtgtcgcggttttgagattttcgggtcggatgcgcggcggttttagttttcgagcgtttgtttttttcgttttgggttgttcgggttttttgggtttttcggcggttgtacggagttaaggcgtttcgtttcgggcgtttttcgcgggtgtcgatttaggttgttcggagttcggagtttagagaggagagagatagttggggagtttggttatcgcgggtattttttttgcgttgtagtcgttcgtttggtttgttttttcgttttttcgttttttgttttgattttttttttttttgtagagtcgtcgtttagcgtttcgatttcgttattatgagagttttgttggcgcgtttgtttttttgcgttttggtcgtgagcgattttaaagtgagtgcgtttttgttttgattgatgttgtttaaggatttttgattagtattaggggagaggaggggttgtttagggagttggggtttttcggattttatttatagtagggttagattttttttaggaaatgggatagggtggtagcggaggtttgagaattacgggggttggtattggttggtaagggaggaagaggtcgtcgggattgttttagtttgcgggtatttggtagatgaagtttgtttgggttaatttattttttttggttggaaatttatggttttttatttgagaattagatacgaatagggtgaggcgagagggagagggaagagtgggttttgggattggggttagtttatttttattttggagtttttggagtatgggatttttgatgaagttttttttcgaattttttttagggtagtaatgaattttattaagttttatgtgagtatttatttttataatagttggttgtatagataagttgggaaggttttaggggatattttttttttgttttttgttgtagggttgcgttattttttattatttttattttttttcgtttattttatttttgttttttttagcgaattgtgattgtttaaatggaggaatatgtgtgtttaataagtatttttttaatatttattggtgtaattgtttaaagaaattcggagggtagtattgtgaaataggtatggggatttttattgtaattgggagagaaatttggggatagggagggatgggtgggaggtaagagtaggtaggagttaggagttggaggtagggtgggtgatatttttatttttatgtgataagtataaatatatatatacgtttacgaaatagtggttatataaatgtgaggtggggttggaaggagattttgtttagttttttggtaggtttgaaacgatatttttaaaatgttcgttggtagtcgggtatggtggtttacgtttgtaattttagtattttgagaggttaaggtgagtggattatttgaggttaggagtttaagattagtttggataatatggtgtaattttgtttttattaaaaatgtaaaaattagtttggtatggtagtggatgtttgtagttttagttatttgggaggttgaggtaggagaattgtttgaatttgggaggtagagattttagtgagttgagattatattattgtattttaattgggcgatagagtaagattttattttaaaaaaaaaaaataaaagttagttggaatgttttttttttttttatatttttttatttttttgtttttttgtagataagttaaaaatttgttatgaggggaatggttatttttatcgaggaaaggttagtattgatattatgggtcggttttgtttgttttggaattttgttattgttttttagtaaacgtattatgtttatagatttgatgttttttagttgggtttggggaaatataattattgtaggtgaggtgggggtaataaggattaaaagttttttttatagttttttagaaattttgttattattttttttttttagagggttggttatagtataagagaagtgcggtttttggttgagttttttttgaggggaggaggtagggaaggttttttgggttggaatgatattttttatttttttgtgttgttaggaatttagataatcggaggcgattttggtgttatgtgtaggtgggtttaaagttgtttgtttaagagtgtatggtgtatgattgcgtagatggtgagtattattgatttgttgatgatagtggggtggaaggggataaatttatatgtttttttattttattataggaggattgaggaggtggggggtgttcgagagggatgtttttttttatttgtttttttaagatatttttttgtttgttttttaggaaaaaagttttttttttttttagaagaattaaaattttagtgtggttaaaagattttgaggtttcgttttaagattattgggggagaatttattattatcgagaattagttttggtttgcggttatttataggaggtatcgggggggttttgttatttacgtgtgtggaggtagttttattagtttttgttgggtgattagcgttatatattgttttatgtacggttttgggtttttttttttcgatttttttgttttattttaagtatattttttttttttttttagtaaagtgtttcgttttattttttttttatttgtt

SEQ ID NO: 85 - DNA, 4453 bp, Artificial Sequence
  chemically treated genomic DNA (Homo sapiens)
ggtagatgagggagaaatgaggcggaatattttgttgggaaggagaaagggatgtgtttggggtggggtagaagagtcgaagaggagaaatttagggtcgtatatgaagtagtgtgtggcgttgattatttagtaagggttgatgaggttgtttttatatacgtaggtgatagagttttttcggtgttttttgtagatggtcgtaaattagggttggttttcgatggtggtgaatttttttttaataattttaaagcggggttttagagttttttggttatattgaaattttaatttttttggaggagaggagggttttttttttggaggataaatagagggatgttttagggaggtaggtaggagaaagtatttttttcgggtattttttatttttttagtttttttgtgatggaataaggggatatgtaagtttgtttttttttattttattgttattagtaggttagtgatgtttattatttgcgtagttatgtattatgtatttttggataagtagttttaggtttatttgtatatagtattagggtcgttttcggttgtttgggtttttggtaatatagaaagataggggatgttattttaatttagagggttttttttgttttttttttttagggaagatttaattagaggtcgtattttttttgtgttatggttagttttttgggagaaggggatggtaataaggtttttgggaagttgtagggagggtttttggtttttgttgtttttattttatttgtagtaattatgtttttttaggtttagttgaagagtattagatttgtgggtatggtacgtttgttgaaggatagtggtagagttttagggtaggtagggtcggtttatggtgttagtgttggttttttttcggtaaaagtgattattttttttatagtaggtttttgatttatttataaggggataggaggatgagagaatatgagaaagagaagaatattttaattaatttttattttttttttttgagatggagttttgttttgtcgtttagttggagtgtagtggtgtgattttagtttattgagatttttgttttttaggtttaagtaatttttttgttttagttttttaagtagttgggattataggtatttattattatgttaggttgatttttgtatttttagtagaggtagggttatattatgttgtttaggttggttttgaatttttgattttaaatgatttatttattttgattttttaaaatgttgggattataagcgtgagttattatgttcggttgttaacggatattttaaagatgtcgttttagatttgttagaagattggatagggtttttttttaattttattttatatttgtgtggttattgtttcgtgagcgtgtgtgtgtgtttatgtttgttatatagggatgaagatgttatttattttatttttagtttttaatttttgtttgtttttgttttttatttatttttttttgtttttaaattttttttttagttgtagtggagatttttatatttattttatagtgttgtttttcgaatttttttgggtagttgtattagtgaatgttggagaagtatttgttggatatatatgtttttttatttagatagttatagttcgttggagagaataaaggtggggtaagcgagggggagtggaagtggtaaggggtggcgtagttttgtagtagagggtagggaggggatgttttttgaagtttttttaatttgtttgtgtagttaattgttgtaggggtggatatttatatggaatttgatgaagtttattgttgttttggaagagattcgggaggaggttttattaaaggttttatgttttagggattttagggtgagggtaaattggttttaattttaaaatttatttttttttttttttttcgttttattttgttcgtatttagtttttaaatggaagattatgggtttttagttaggagaaatggattgatttaagtaagttttatttattagatgttcgtaggttggggtagtttcggcggttttttttttttttgttagttagtgttaattttcgtggtttttaagttttcgttgttattttgttttattttttggggagagtttggttttgttgtggatggaattcggaggattttagttttttgagtagtttttttttttttttggtgttgattagaggtttttgggtagtattagttaaagtaagagcgtatttattttggagtcgtttacgattaggacgtagagaagtaggcgcgttagtagggtttttatggtggcgaggtcggggcgttagacggcggttttgtaaaggaaggagaagttagggtaagaggcggaggaacgggaaggtaggttaggcgggcgattgtagcgtaggggagatgttcgcggtgattaggttttttagttgttttttttttttttgggtttcggatttcgggtagtttggatcggtattcgcgggggacgttcgggacggggcgttttgatttcgtgtagtcgtcggggagtttagggagttcgggtagtttagggcgggggaggtagacgttcgggagttggggtcgtcgcgtattcggttcggggattttaggatcgcggtatttatcggtggttgcggtaggagggcgcgagtcggcgttgcggggataggtggattttggttcgggtttcggggttgcggttttcgtattgtgttgcgattcgcggcgtttgttttatattagggttcgtttcggcgtcgtttttttttttttcgttcggtttttttttttgttttgtagcgtttagcgattcggatttcgcgtgttttcgtaacgtttataaagatttgggggaagcgcgatttttagcggaggggatttaatagcgtttggattgaggaatcgagaggtttgtaaatttttcgtgtttttttttatgtatttggtcgggggtttgttttagtgtaaggagttttcgaattgtagagaggagagaaggcgtataggagattttttatttcgtttagttttgaagttttttggggttttttaattagtttttttgtaattttttttcgttgggttttaatttgtttaagattgttttagatttttttgttcgtagttgatggagttgtgaagtttttattaacgcgataaatgtacgagatatatttttttagaagtatagatagaaaaatttttgtttgtaggggttttttttgtgcgtttgtttagtggtagtttttagatattattaatataattagtggatggaataaagtcgggtttattgttttcggtagtaagggggtttgtttgatggtgttattagagggggaaaggtaaggttagattattgaaaatttgtagtttggtttaaagttcgtttttgatagggtttgataaggattgggttaggtgtcgtgatatgatgttataggattgtgggaataaagttttagggtataaattgttggtgttttttattgaagtgttaacgggttttttgggaagtttttataatgagtaatttatttatttgtgtaggtaagaataaaagtaaagataatggaaatatgtagatagttttaattgtggaggttttggagggtgtggaagttttgtttttatttttgagtagaggaattgggagattggaggataaaataagaggaagatttattttttattgtttgtttttttatatttttaatattttaaaaagtatatttttgtatagtttattttaaaaagataattatgtattttttaatgtatgtgtatttagtgttttattttattatagagttttgtttattttatttagatagaaataattgtttattaaataaaattgttttttagaaaaatagattatgtgtaaatgattgtatttattttttttgtttgaggataagtagatatttgtgtatatatatatatatatatacgtatttttgggtatatttggaggaatatagtagggattttgtgattttgttatttttattttttttttttagtgttaggaattagggtttggggttattttgaatttagtaggattcgtttttttagtgggaaggaggaggttgagttttagtaatttattagcggttttgggtttttttttagtttaggtttgtagtatttttttgttttgtaaatttggattttgggtttgggtttatttgagagtgatagaaggaaggtagggagagtgttaggaaggtaggaaggaggaaggtttttttgttttgttttagtcgagggtttagggtgttagttgtttgttggggaaagtataagttagttttttagtttttgggaggtaggtgatttattgttttttggagagatttttgtgtttgttgagttgttagttttttaggggatagattgagttagcgatgttataggttttagagttaa

SEQ ID NO: 86 - DNA, 10490 bp, Artificial Sequence
  chemically treated genomic DNA (Homo sapiens)
agaaggtgtttgtttttttttcgttttttgttatgattgtaagttttttgaattgggagtcgattaaattttttttttttataaattatttaggtttaagtatttttttatagtagtgtgaaaataaattaatattttttttttgaggcgttttttttttaggtaattcgttgtttttatgttttttttttgttttttgtttttttttttttttttatgaggtttaagtgataaacggggttagttttagttttagttttagttttagttttattttattgtaggtttgtgtggttgttggagaggtcgtgtttttttttttttttcgagtttgtttgatatgttttttggattttggaggaaattgattttttatttttatattggtgtaatattttttaagattttaaagttgtattatttgagttagtttttttttttatttttatttgttagggttgttattgggatagttttagagggtggtgttaatggatgaatggatggatggatagtagtttagggatgatgtttttgtttgttttgaatcgggttttttttttaatgagaagtttttttgagtgagtatatatagttattttttggtatttatggaggattagttttagggttttcgggaatgttaaaatttatggatgtttaagtttttgatataacgtggtttagtatttacgtataagttatgtatattttttcgtatacgttagatcgttattagattatttatgatgtgtaatataatgtagatgttatataaatggtcgtgatattgtattttttagggaatgatgataagaataaagtttgtatatgtttaatagaaatataatcgtttaatttattttttgaatattttttatttgttgttgttgaatttatagatgtagagtttttggatacgagagttaagtgtgttttgagagtagggtgggtgaggttgttaatgagtataggggagtaggtgttgattaggaggattttgtattggggtatttggacgttttgttttaggatttgagattttagttggatggtataggtagatttagtttaggttaaagtcgtttttttgaagtttttttttattttaagttttttttggattttggaattcggtattttttaggttttgcgtggaaggatagatgaattaggttttagataatatgtttagaagagtgagtttttattgtgtgttcggtattttttttataggattttttagttagaatatttaagggttatggagagaaatatttagttaaaatattagaaaagaaaaagtgatattattagagatattaaaaagattattaggtaatagtattagtttttgtattttgagatttaatagtagtagttatttttttttatcgttatgtgtattttaggattattttgggcggggagggttgcggttagggagtagttatggatgttttgatgttggttttgggtttcgggggtgatagtgatgaggaattgggtgtatatatgagtggggtagtcgggtttggttagagaagtagtatatacgtgtatagacgtgtttatttatatatatatgtgtacgtacgtgtataaatatattgtaggtaggtatgttgacgttttaggtagcggaggattttgattttgggcgttgttgattcgggtaaggttttattgtgattcgtgttatgattttagaatgttattggtgtttagtatttgtttgttttttggtttgttttagtggtttatagtagttatatataggtagtggtatttgtgagtagttttgtggatttaaaggttttttttttgagaggtatgatttaggttagttgatttattagaattaggtgagcgtgatttgtttttttttttttaggcggatttggggatagtggttacggtgcgggcggtgttggtttttgtggggtagttatcgaggagggttatttttgagtatttattaggcgttcgttttatattgttcgtgtagacgattggttttttcgtttttatggtggtttcgtagagtgggtgttgtttttaaatgtttttattcgatagatgagacgtttggggttagagaggtagtaatcggtttgggaattcggatatgattttgagttttgtttttagttttgtcgtgtgttgtgttggaatttaggtttgaattttgtgatttttttgttttagattttaaatttgtttaggttttttatttcgatggggtagagtttggttttggtagagttattggtatagagttattggtatagatttattgacggtttttagaatatttttgtgttttaagttgggttttgatggtcgttgtgggttttattgaatatatatggttttttgtttaggggagtttgttgtttttgggtagttgtggaaaatgaaggagttttggagggttggttgaggggagattatttttttttgtgtttaaaggggttcgggtattagggttttttttaggtattttttgttttgcgtggtttttttgaggtttcgttttttttttgtttcgagtatttttaggagggacggtttatttagttgttttttaggattaaggatttattgtttttttttagtgatttaggaaaatgaagtttttttttgttgggacggtttagaatggtggattttatagttttttcgcgagagacgtggtttttatgcgtataatagattttttttattttttaaatttaatatttttttgtttaataggcgttatttttaaagtggttttattgtttagattgaagagttacggtagttaaagtgatgagcggagtagaatcgagtagtcgggagagattttgttttttgtaggaaattgggtatcgttgaggttttgagtattttaggaggtcgattgtatagagatttttggtcgttgattttagtttgtttttatatttttggaatagtttattatgggttttttatttttggtaggtggaaattatttaatttgttggggtcggtgtgtttttattttatggtattgggggataataggattttttgtttaggttttattgtatttaagtttttgggaagatgtttatttttgtttgggatttgagattttagagattggagtagttgtgggttattgggtttggtttttttttttttgggggcggcggtggaatgggggttacgtagttagttagtatttgggagttcggcgagagcggtttaggtgtttttcgaagtcgtcgcgtatagtgtgatttttagataattttgttttataggatggacgtggtagaggtcgcgggtagttggtgggtataagagcgagaggatattattatgaaatacgaaaaggtataagtcggtttgttttttggagggaggttttttttagtgtgttttggttaaagggttttgggttttttaggagtatagggtagggacgggtggttaatgtttttaggtttttgtattttttattttggattttttattaaggttttttttgggttatagggatatcgagttgggttgttagaggataaggggtttaagttttttcgaagttataataataacgtcgattatttggggattgtatagtgagttttttgtattttttttatttttaaagtatttgttttagtttagggatgggtttgtttttagaaaggtttttttgacgtaggatatgttttattaggtcgggttaattttttttttagggatagaatttttttttgatttttttgtaggtttagttcgaggttgttaggttagaggtgtggggtttatttagggagtcggtgggaatggagattgggttaggttaggtttttgggcgtttagtagttttgtcggtaagtgagtataagaggagcggggtagtttgagggtttggttttgtttatttggagataatttcggtgagatgtaagggttatggttatagggtgaggggacgtttggtttagttttagggttgttgtttagtaggtttttgagggtttatttgtttttgtttttttttatttttttagagttatagtttttattgtttcgtgaggggaaaaggtatggtgataatgggggttgtagttttaggagaacgggggagaagatgggtagggtttcgttttgggtattttacggtgaggttagggaggtagtagggttcgcggttaaagatttgggtttggtgttgggaagggatttggggtcgggtaagaggagtttagttaggagtttattttttagggattataggatggagagatagaggatttttggggaggtagggcgggagggagttgacgagtcgtgttatttttgaaacgtagggtgtgtggttcgggtgtagggagaggtaggtggatgttgggaggttagaatttgtaagggttttggggttgttaagtggggtgggtttttggtgtagttagagtatatcgggtaggttttagggtaggtttttttgattttggcggggggatgtggttattttttgagggatttttgttagggttcggtcgtttattttgggcggtttttattttattttagggttaattttttttagttttagtagaaagtattatttcgagtttaggacgggtagttttattgggtagtttgatcgttttttacgttaggggttttagtaatttcggttaggttgtttttatattttttttttttttaggttttgttttttttgggagttagttttataggaaggtttttgtttttttttttttgtgtttttttttgggttgagttttgagttggaaagggatagagttagttttttttgggggtcggtatttaggttggggtcgttttaggtttcgtgtagttttttagttttgtttgggttgttttatagtgagacggagttgttttttttgattgcgcgggaggcgaaggtaagagtttgatgcgtggaggggttggtttagggacgtagggattgggcgggtggttagtgaggtagaggaagtagttggtttgagcggtggcgggtgagggtaatacgttgttattgggaggggtagtagtttttgttggatttgattttaggttgttgtttattttggtagtttgataaaattttaaaaggagaattatagttttggtttgggggtggttgcgcgtttgtgttaggattttatttagaggttgggatttaagattggtgtgtttgtggtttgaggatggtatatttcggggttttaaagttagtttattggtgtttatttgtttaaaggtttttagtttttgaggtttgtttttttttggttttttttagttggtttttattagggttttagagtttaagatttagtattcgcgggcggttttgggaagtttggtagtttcgttaattttaatatgttttatttgatagtaaattcggcgggagattagtcgaaagagtaagtgggtggatatgttgggagattgggagaaatataaaagtagtagaaaggtaacgtgtggagggaggaagtattttttgtagagataggggataggtatttatggttgtggtttggtattattagttttttagagggtgggcggtatattgttttcgtttagaggattgtaggtttggtcgttagattttttgtttattcgtgtaagcgttattttgtagggagggaatttgaatttagggttgggattattcggagtttaaggttagggatgttttggtgatttgaaggaaggaaaaggtttagattagagtttcgattttgagtgtttatttatttttttagttttgggaagggagattttgttttagtttgattttatttttattgaggaattatggggttaaaatcgataatttttagaattttcgggttttggtttttattggggttatttcgtggtttgtgatattagatcgttttttgtttatagtttatagatcgagcgtataagggaatgtttatgaatattcggggttcgatgtggttagtttttttgaatattgaggaaatgaagttgaaaaatttcggaagatattaggtacgtttagttagagtataataaataggataggtcgtgtcggggtttaggtttttagttggagggaacgttaagattattttggggagttgggggtgaaggttagatgaatattttgggtatagatggtgatatagttattatagataaatttagttttggtgattttttttggttttagtaataagttaaaatgtagttttttgtagaaggaaattttttttttgtttttttttttcgaagtgttgattgtgggttgattgttattgggggtagggagttttttatttgttttgagattgttttttttttttggttttgttttatagattatgaaggagaagggtaagaggttatttgagtatatttagcgtatcgatcgggacgtaagcgggatattaaggaagtatatattttttagggatcgatacggaattaagtaagtttacgggagttatagggttttagtagagatggggtgaatgagagggatgggggttttttcggagtagaagttagggttatttaggagggatgatatagttgttaagagttttttcggtttagggagtagtcggtattatgaatcgagtatttttttggttttaagttttgggttagattggaatatgtggggttagaatttaggaggattttgaggagatggaaggtagtaaataaaattatgtataatggtgaagggtgttttttttgatttatggggatttatggtaggatttacgggagggtggtaggatagagggtttatgagttttttttaggtaatagtgatagtattaaatgttgggagaattaggggttttggaaatttttatttaggttcgttgggaatatgatatggtatagttacgttggtagttcgttgggtagtggtttataaagttcgatggatttgaattatatatttttaaagtgttatagatattgaatttattgatttgtaaattgatatttatatgaaattagtatgttaggtttattgtttgatttttcgttatttatatacggagttttcggggacggtttttaatacggggatggggagagtaaggttggttttttttttaaacggaagatttagtgagaaaagggaacgagtcggtgatgttcgtacgaacgtgggtggattttagatgtattttgttgagggatagaagttagatttaataagttattatagtaggatttttatttttaggttattttggaaaaggttaaattatagggattgagaagtagtttgggtggttaggggttgacggatcggggagaggttgggtgtataggggttattttggagatttggaggatgaaggagtcgttttaggaggggttggagcggtggtcgggagattttgtatattggtttggaatcgtggaggaattgtatatttatagattgaattggcgtgtgtgtaaattgaaaaaaaaaaaaaaaaattatttagagtgaaaaggattaggtaagttattgtataattgggttatttgtatgttatagatgtggattttattgaaatatttttttaagagttttaggttttgaagagtttattgtttatttggtgaaatatttgaatttgaaatgggatttgttgttaggttttgtagataaagtgaaattaataatatttgtataaaataaattaaagttttttttttttgttttttaggtagcgggaattattttatatttttttggtatatgaggagtataattcggtgagtattttcggtagtgaggttttcgggttatatttttatattgataggagtgggtgtttggtgggggtgtcgttgttttttttaaagttagtatttgtgatttattaggatataggaggtaggatgttagtttatcgttggtataaatttttaaggaagggggtggttttaaggggttaagttgagatatagaggagttagggtttggatttttggtgttatttgggtttgattattattttttagaataagaaatgacgttttttttttggggttgttttaaagtttaggagtttggtagtatcgtatataggatggtgttattagtagatattttggataaggtgttgaagtgtttgatggatttggtttttgttatgaaatgaatgtgtattttgaggaagttttttttttagaggaagttttttttttagaggaagtttttttagttatttttgttttttttaatgatatgagtttttttaggtgattttagtttttttaggtgatgtttttttatggtgattttggtttttgtaggaggtgggttattgtagggatttgagttatatcgtcgttttgttttttttttatttttttgaggaggatgtattttgggtattggtgtagttgttggttagtgagaggtattttttgtagggtaagtgaatagttgtttcggggattttttgtagttagatttggggatggttattttggttaggtgattatagtttttagttaaggtattttttttgtgtcgttagtttgttgggagattttaggatgtttttgttgagggttttataggagtttacggttgatttttaaagtttaaattagacgttttttatttttattagtagagggtattttatttttttcgtggttattttttgtgttttggagttacgtttttcggttttgattttgtgtagttgatttttttttttttgagagtttttttgttttttagttgttcgggtttttgttgttatcggtgtttacgaatgggtcgattaagtttaggtggtagtatttttttattttttgttttttggttcgattttattattaggagatgatcgggaagtttagcgtttatttagtttcggttattttgtcgtggtttgaaagttaggtttgttttttttgtattttggtttaggaggtttttaggggaatttttagttaggttttagggaatgttttcgttttatttttttagggtaaaggtcgtatgttggggttattagatgggagggtgggaggttttggggtttgggggtttttttagttgtttagtttttgtagttgatggttttatattttgggggaaggttttgattttatgatgggttgggggttttttaggattttatagtttaaatggcgggatcgtttaggggttttaagattaataggagtatgtggtagttacgttataatttaagattatggggtattaggtgagtttatggtttttttagttttttttagaggttttgtttttcgtggggttgtaggagtaggggggttggagtttttcgtggggttggtgattggttgagttttagttagggtttgatttgggacgtcgggttttttatgggttgggagttggtttttttttttgttttggaggagatagaggtatagggatgggggtttagttttcgtagagtagggtaaagggtagtgtgtttatcgggagtgtgggaaggtgatagtgttgtggggagttttggatatcgtttagtgttttgtattaggggaagggtttttagaggttttggaagagggaggtttttagggtagtttagtggtttgagtatttttgttgtttttattaggataagaaagatttatgtgggtagtgtttttcgttaggttgttttattcggatattgattgacggggtaaggaggtatagggagattttggtttagggattttttttgttttgtagtgttttgtttttttagttcgggggtttggtttatttttagtttataggaggtttaggcgggtttttaaaggatatataagtaaaattttttgtttaaggggggttattttagggttatggttggggtttaggtttagttttatgggtagattgggttaggattcgatttgagagggtttagggaagttttaagttttgggtaagtttttttttttaggagttatatttttatttaaatgagtgttttttatgaggagttttaagattttgtttgatttagcgttttggagggtttaggcgatttttatggggaaggttattgattttggagattgaagttttagtgtgcgtagttcgagttattagttttagtttggaaggattaggtttttttatatttgttgtttttatagatttttttcgggtttattttgcgtttgtgggacgtgtatttggtagaaggcgaataggcgttgatgtcgataataagaatcgtttttaaggtttagtagagtaagtttacgtgtgtttagcggggtttggggagttttggggttagatttcgattggttcgagggtagtttttttatattgtttttatgattttttgttttggtttagagggaggtttggttaggtgggttgggtaggatattgtgatatcgagtttattttttatatgatttagatgaaagtcgagagtgtggtgagtatttttttgttt

SEQ ID NO: 87 - DNA, 10490 bp, Artificial Sequence
  chemically treated genomic DNA (Homo sapiens)
ggatagggaagtgtttattatattttcgatttttatttgggttatgtgggggatgggttcggtgttatagtgttttgtttagtttatttggttagatttttttttgggttagaatagaggattatgaggatagtgtgaggaagttgttttcgggttagtcggggtttgattttagggttttttaggtttcgttgggtatacgtagatttattttgttgaattttaaaggcgatttttgttatcggtattaacgtttgttcgttttttattagatatacgttttataggcgtagggtgagttcgagagagatttgtggggatagtaggtgtgaaagaatttggtttttttaggttggggttggtggttcgagttgcgtatattggggttttagtttttagagttagtgattttttttatgagggtcgtttgagttttttaggacgttgggttagataaggttttgaagttttttatggggggtatttatttgagtggggatgtggtttttggagagaggggtttgtttagggtttgaggtttttttgagtttttttaagtcgggttttggtttagtttgtttatgaggttgggtttgagttttagttatggttttgggatgattttttttgggtagagggttttgtttgtgtgttttttggggattcgtttgagttttttgtgggttgggagtgagttagattttcgggttggggaagtagggtattgtagggtaaggaaggtttttgagttagggtttttttatgtttttttatttcgttaattaatattcggatgaggtagtttaacggggaatattgtttatatagattttttttgttttgatggaagtaatagaggtgtttaggttattgggttgttttaaaaattttttttttttagggtttttgaagattttttttttagtgtagaatattgggcggtgtttagagttttttataatattgttatttttttatattttcggtggatatattgttttttgttttgttttgcgggagttgggtttttatttttgtgtttttgttttttttagggtaggaaaggaaattaatttttagtttatggagaattcgacgttttaggttaggttttggttgggatttagttagttattagttttacgaggggttttagtttttttgtttttatagttttacgggaggtagggtttttgggaagagttgaggggattataaatttatttgatgttttatggttttgggttgtgacgtggttattatatgtttttgttggttttggagtttttggacggtttcgttatttgggttgtgaaattttgagaagtttttagtttattatgaaattagagtttttttttaagatgtggagttattagttgtaagagttgggtagttggagaggtttttaaattttaaggttttttatttttttatttggtgattttaatatgcggtttttattttggggaggtggggcgggaatattttttggagtttggttggaggtttttttggaggttttttgggttagggtgtaaaaagggtaagtttgatttttaggttacgatagggtggtcggaattgggtgggcgttgggtttttcggttattttttggtagtggggtcgggttagggaataggggatggggagatgttgttatttgggtttggtcggtttattcgtgggtatcgatggtagtaggagttcgggtagttggagggtaggaggatttttagggaggggagagttagttgtatagaattagagtcggagggcgtggttttaggatatagagggtggttacggggaggatgagatgttttttgttgatggggatgagaggcgtttgatttgggttttgggggttagtcgtggatttttgtgggatttttagtagagatattttaaagttttttaataagttggcgatataaggagggtgttttggttgaaagttgtgattatttggttagggtggttatttttaggtttggttgtaggaggttttcggggtagttgtttatttattttgtagggagtgttttttattggttagtagttgtattagtgtttagaatgtattttttttaggaagatagaggaggaataaggcggcgatgtggtttaggtttttgtagtagtttattttttgtaagagttagagttattatggaaggatattatttgggagggttgaggttatttgggaggatttatgttattggagagggtagaggtgattggagaggttttttttgaaggagaggttttttttgaaaaagaggtttttttaggatgtatatttattttatgataagagttaagtttattaggtattttagtattttgtttaaaatgtttgttgatagtattattttgtgtgcgatgttgttaagtttttgggttttggggtagttttaggaggagggcgttattttttgttttgagaagtggtggttaggtttaggtgatattaggagtttaggttttgatttttttgtgttttagtttgattttttgagattatttttttttttggaggtttatgttagcggtgagttgatattttattttttatattttggtgggttataaatattaattttaaaagaagtaacgatatttttattagatatttatttttgttaatatggaaatatggttcgggaattttattgtcgggaatatttatcgggttgtattttttatatgttaggaggatgtggagtagttttcgttgtttaggaaatagagaaagggggttttggtttgttttgtgtagatgttgttaattttattttgtttataaagtttaatagtaaattttattttaggtttagatgttttattagataagtagtgagttttttagggtttgagatttttgaagaaatgttttagtaaaatttatatttgtgatatgtaaatagtttagttgtatagtgatttgtttgattttttttattttgaatgattttttttttttttttttagtttgtatatacgttagtttagtttgtgggtgtatagtttttttacggttttaaattaatgtgtagagtttttcggttatcgttttagttttttttggggcgatttttttattttttaagtttttagggtggtttttatgtatttagttttttttcgattcgttagtttttggttatttagattgttttttagtttttgtggtttggttttttttagaatggtttaggaatgggaattttattgtggtagtttattgggtttggtttttgttttttagtaaaatgtatttaggatttatttacgttcgtgcgggtattatcggttcgttttttttttttattgggtttttcgtttgaagggaggattagttttgttttttttattttcgtgttgaaggtcgttttcgaaggtttcgtgtgtgagtgacgaggagttaagtagtgaatttggtatgttggttttatgtggatgttagtttgtaaattagtgggtttaatatttgtgatattttggggatgtgtggtttaagtttatcgagttttgtgagttattgtttaacgggttgttaacgtggttgtgttatgttatgtttttagcggatttggatgagagtttttaggatttttaatttttttagtatttggtgttgttattgttgtttggggggggtttatgggttttttattttgttattttttcgtgggttttattatgggtttttatgggttagggagagtattttttattattgtgtatgattttgtttgttgttttttatttttttaggatttttttgggttttggttttatatgttttagtttggtttagggtttggaattagggaggtgttcggtttatggtgtcggttgttttttgggtcgggagagtttttggtagttgtgttattttttttgggtgattttggtttttgtttcggggaagtttttattttttttatttattttatttttgttgggattttgtggttttcgtaggtttatttggtttcgtatcgatttttgaagaatatatgtttttttaatgtttcgtttacgtttcggtcgatgcgttggatgtgtttagatgattttttgttttttttttttatgatttgtagggtagggttaagaggaggaagtagttttagaatagatggaagattttttgtttttagtggtagttagtttatagttagtatttcgggaaggaaggatagaaggaaggtttttttttgtagaaagttgtattttggtttgttattgaagttagggagggttattagagttgagtttgtttgtggtgattgtgttattatttgtgtttagggtgtttatttgatttttatttttagttttttagggtggttttgacgttttttttagttggagatttgggtttcgatacggtttgttttgtttgttgtgttttggttgagcgtatttggtatttttcggggttttttaattttatttttttaatgtttaggaggattgattatatcgggtttcggatgtttatgggtatttttttgtacgttcgatttatgagttgtgggtagaaaacgatttggtgttataggttacggggtgattttagtgaggattagagttcggggattttggaaattgtcggttttggttttatgattttttagtagaggtgagattaagttgggatagggtttttttttttaggattgaaagagtggatggatatttagagtcgaaattttgatttgaatttttttttttttttaggttattagggtatttttagttttgagtttcgggtagttttagttttagatttagattttttttttgtaaggtgacgtttgtacgaataggtaggaaatttggcgattaggtttgtagttttttgggcgaggatagtgtgtcgtttattttttgagaggttgatggtgttaggttatagttatgggtgtttgttttttgtttttgtagagagtgttttttttttttatacgttatttttttgttgtttttgtattttttttagttttttagtatatttatttatttgttttttcggttgatttttcgtcgaatttgttgttaaatgaggtatgttggagttagcggagttgttaggttttttagagtcgttcgcggatgttgggttttgggttttggagttttggtgggagttagttggaaggagttagggaagggtagattttaagggttgagagtttttgagtaaatgagtattagtgggttggttttgggatttcgggatgtattatttttaggttatagatatattagttttaggttttagtttttaggtggggttttgatataagcgcgtagttatttttaagttaggattgtggttttttttttggaattttattaaattgttaaagtgaatagtaatttggggttaggtttagtagggattgttgttttttttagtgatagcgtgttgtttttattcgttatcgtttaggttagttgttttttttgttttattgattattcgtttagtttttacgtttttggattagtttttttacgtattaggtttttattttcgtttttcgcgtagttagaggaggtagtttcgttttattgtaaggtaatttaggtagagttgaggaattgtacggggtttggagcggttttagtttgggtgtcgatttttagaaaggattggttttgtttttttttagtttagggtttagtttaggagaaggtatagggaagggaggataagggtttttttgtggggttgatttttaggaggggtaggatttgggagaagaaggagtgtagggatagtttggtcggggttattggggtttttggcgtggggggcggttaggttgtttagtggggttgttcgttttggattcgaggtggtgttttttgttggagttgagaaaggttagttttgagatgggatgggggtcgtttagggtgggcgatcgggttttgataggagttttttagggagtgattatattttttcgttagggttaagggagtttgttttgagatttgttcggtgtattttggttgtattaggggtttattttatttgatagttttaaggtttttgtaggttttgattttttagtatttatttgtttttttttgtattcgagttatatattttgcgttttagaagtggtacggttcgttagttttttttcgttttatttttttagggattttttgtttttttattttgtgatttttgagggatgggtttttggttgggttttttttattcggttttagatttttttttagtattagatttaggtttttagtcgcgagttttgttgtttttttggttttatcgtgagatgtttagaacggggttttgtttattttttttttcgtttttttagggttatagtttttattgttattatgttttttttttttacgggatagtgagggttgtagttttaggggaatgggggagaataggggtaggtgggtttttagagatttgttggataatagttttgaggttgggttaggcgtttttttattttgtggttataatttttgtattttatcggggttgtttttaagtagatagggttagatttttaggttgtttcgttttttttgtgtttatttgtcgatagaattgttgagcgtttaggggtttgatttagtttagtttttatttttatcggttttttagatgggttttatatttttggtttaataatttcgggttggatttgtaggggagttagggaggagttttgtttttggaaaggaggttgattcgatttggtgagatatgttttgcgttagaaaggtttttttaaaagtaaatttatttttgagttgagataggtgttttaggggtgaggggagtgtagaggatttattgtataatttttaaatgatcgacgttgttgttgtagtttcgaaaaggtttaggttttttgttttttggtagtttagttcggtgtttttgtagtttagagggagttttggtgaggggtttaaggtaaagggtgtaagggtttgggggtattggttattcgtttttgttttgtgtttttagggagtttaggattttttgattagggtatattggaagaggtttttttttaagaagtagatcgatttgtattttttcgtattttataatgatgttttttcgtttttgtgtttattaattgttcgcgatttttattacgtttattttgtgagatagaattgtttaaaggttatattgtacgcggcggtttcggagaatatttgaatcgttttcgtcgggtttttagatgttggttggttgcgtaatttttattttatcgtcgtttttagggaaaaaggggttagatttagtggtttatagttgttttagtttttggagttttaagttttaagtaggggtgggtatttttttaaggatttgagtatagtgggatttagatagagaattttgttgttttttaatgttatgaaatggggatatatcggttttagtaggttgaatggtttttatttgttaagggtgaagggtttatgatgggttattttagggatgtggaggtagattggggttagcgattagaggtttttgtgtaatcggttttttgggatgtttagggttttagcgatgtttagttttttatagggaataagatttttttcgattgttcggttttatttcgtttattattttggttatcgtggttttttagtttgaatagtgaagttattttaggaataacgtttgttgagtaggagggtgttgggtttgggggatgagaaagatttattgtacgtatggaaattacgtttttcgcggagggattgtggagtttattattttgagtcgttttaataggaggaggttttatttttttgggttattgaggaagaatagtgggtttttggttttggagaatagttggatggatcgttttttttgggaatattcgaggtaaaaggagggcgaggttttaagaggattacgtagagtaagaaatatttggggagaattttagtgttcggatttttttgaatataagggaagatagtttttttttagttagttttttagggtttttttattttttatagttgtttaagggtagtaggtttttttggataagggattatgtgtgtttagtggggtttatagcgattattaggatttagtttagggtatagaggtgttttgaggatcgttagtggatttgtattagtggttttatattagtggttttgttaggattaggttttgttttatcgggatgggaaatttgggtagatttgggatttagggtagggaggttatagggtttaggtttgaattttagtatagtatacggtagggttgagagtaaaatttagggttatgttcggatttttaggtcggttattgtttttttgattttagacgttttatttgtcgaatggggatatttgggaatagtatttattttacgaagttattatggagacgaaagagttaatcgtttatacgggtagtgtagaacgggcgtttggtgagtgtttagggatgatttttttcggtagttgttttatagaggttaatatcgttcgtatcgtagttattgtttttaagttcgtttggagggaagagagtaggttacgtttatttgattttgatgaattagttggtttgggttatgttttttagggagaaaatttttgagtttatagagttgtttatagatattattgtttgtgtgtaattgttgtagattattgaggtaggttagagagtagataggtgttaagtattagtgatattttgaggttatggtacgaattatagtggggttttgttcgggttagtagcgtttagagttagggtttttcgttgtttgaggcgttaatatgtttgtttgtaatgtgtttgtgtacgtgcgtgtatatgtgtatgtgggtaaatacgtttgtgtacgtgtgtgttgtttttttggttaggttcggttgttttatttatgtgtgtatttagttttttattattgttattttcgaggtttagggttagtattagagtatttatggttgttttttaatcgtagtttttttcgtttagggtggttttgggatatatatagcggtggagggaagtgattgttgttattggattttagaatataaaagttaatattattatttaatggtttttttagtgtttttaatggtattatttttttttttttgatattttaattgggtatttttttttatgatttttggatattttagttagaggattttgtggggaaagtgtcgggtatatagtaggggtttatttttttagatatgttatttaaaatttggtttatttgtttttttacgtagggtttaggggatgtcgaattttagggtttagaaagagtttgggataaaaagaaattttaaggggacggttttgatttgggttgagtttatttgtgttatttaattggagttttaagttttgaggtaggacgtttagatgttttagtgtagggtttttttgattaatatttgtttttttgtatttattagtaattttatttattttatttttaaagtatatttggttttcgtatttaggagttttgtatttgtagatttagtaatagtagatggaaaatatttagaaaataaattggacggttatgtttttattgaatatgtgtagattttgtttttgttattattttttaaagaatatagtattacgattatttatgtagtatttgtattgtattatatattataaataatttagtaacggtttaacgtatacgggaggatgtgtatagtttatacgtaaatattaggttacgttatattagagatttgagtatttatggattttggtattttcggggattttagaattaattttttatggatattaagggatgattgtatatatttatttaggaaggttttttattggaggaaaggttcggtttaggatagatagggatattatttttggattattgtttatttatttatttatttattggtattattttttaggattgttttaatgatagttttagtaagtggagataagaaaaaagattggtttaaatggtatagttttgaggttttggaagatgttgtattagtatgagaatagggggttagttttttttaggatttagaaagtatattaggtaggttcggggagaggaaaggaatacggtttttttagtagttatataggtttgtagtaggatggggttggggttggggttgggattggggttggtttcgtttattatttgggttttatgaggggaaaagaaagaatagggggtagaggaggagtatgggggtagcgggttgtttaaggagaaggcgttttagggaaggggtattagtttgtttttatattgttataaagaaatatttgagtttaggtaatttataaaggaaagaggtttaatcgatttttagtttagggaatttatagttatggtagaaggcgaaggggaagtaggtatttttt

SEQ ID NO: 88 - DNA, 7001 bp, Artificial Sequence
  chemically treated genomic DNA (Homo sapiens)
atgatattagtaattgtttagtgaggcggatataaaatttttaggatatgagagggagacgtggtttttatattttgatgtgtaaatattacgtttagggaaaatgtaaggtgttttaggtttgtggattttgtatttttttaggtaatttatttatttattttttaattttaataaatgattattaaattttatttaatatataaatatttattgagtattatttgtgtgtatgagaagtgggagttagtatggtaaaagttaggtattgtgttaggtgagagagatttagaaattaaaattagagaagttattaataagagtttaaatatttgggtttaggtttatgtttgtaattttagtattttgggaggttgaaggaggtgaattatttgaggttaggagtttaagattagtttgattaaaatggtgaagttttatttttattaaaaatataaaaaattaggcgggtattgtggtatacgtttgtaattttagttatttgggaggttgaggtaggagaattatttgaatttaggaggtagaggttgtagtgagttaagatcgtattattgtattttagtttgagtgatagagtaagattttattttaaaaaaaaaaaaaaaagagtttaaggatttgatggaggagaaaggtaagaatatgtgcgagataacgtaaggttatcgttttagggtgtttagggtaattacgggggtagggtatttttcggagaggttaatgataagtaggttgaataaagtaggggggttttttgtaggaggaggtttattaggtgaagatggagtcgtatgggtaaaggttattttagagatttaggtgtgtttaggaggtggaaatttattgtaggtaaggtgagaggatcgggtggggtggtttaggaggagtcgatagagggtataagttgtgaaatagtttgaagtagggtagtgaggaaagggatttagaggaggaagatacgtggatagatggggttggttgggggttgtcgtaggattttatgtaagaggttttaatattagagttttaggttttgagtttcgcggaattaaaggttttagaaagtaatttattaggatttggtggttgatagtttgtagtagggggtgaaagaggagtttagagtatttttcggtttttgtttttgttttggggtataggaggggaggaatttagtttggttatattggtttaggtgagggcgttttaggggaggtcgagaggggttgtttttttgtttgttttgttattagggattgtttcgagatgtttttggagaaagtgtttttggtttgttgggaaggattcgtgtttagttttcgttgtttagtagtttttatgggaattttgtttttttggggtttggatttatcgcgacgtgaaggtgattatcgtttattttcgggatattgtgggggttaagagaggtttcgtggtgagggaggattattattttgggggtcgggggggttttttttttagggaggaagatttttagtttcggtgttttgttttcggtagattttgttttgtttattcgttttgtttttgtcgtatgatggaaataaatggaaatggtttttatatacgaatgtattaaattgtaattataattttttagattttagttgtaataggattatggatttgagtgattcgtaaagacgttttgagttttgagttagagggtgtgtggggtggggaggggagtttgttacggtttttgtgattttatagtatagggggtagagttgggggttggggtgggggtaagggcgtaggtagatgggtttgggggtggttagtacggggatttatttagttcgttttgtatatcgaggttattttttttttcgggttttaaagttttttcgttttttgttatgggtttgggggtttttttattgtagtttaatgttggttgtttttttacgttgtttaagtttattttttaggttcggtattttatagtagagattaagaggtggttggagggtagtgggggtacggatagtattattgggcgttttttttttaggtttttttggaaatttttgttttggaaacgtagaaagtttttttttttgtttttattttgaaattgtatttaataacggtaaataagttatttagttttttatagttggtaaagtgtaagtcgtagatgttgttatatagtattttttgatagttttagggtagatcgttgatttattttgtaggtaaaggagttgagatgtaaatattttttaaggaagtaagaatggtttttttttttattttttagaaggatttagggtaatcgatttatttgataatattagggaatatgggttgttagttacgtatttatgagagaggtggttttgatttttagagtatggattttaggggagtttaggaatttgtaggagagggttttttagttggttattattgggacgggtattcgggtttgtgggagagggttttttaggtggttattattgggatcggtatttgggtttatttggatgggttttgggagggtttgtttttgggggagatgttggtatgaatagttaaaagtattattttgagattttacgttaatattttttttttgaaatatgatatttgggaggattgtatagtttttttaatataggaaaatagtttcgattgaaggtagtttttttttcgtcgtatttttcgaaggttttcgggggttttgttattttgagttattttttatttgtttttgtcgattttgtaaattggatatatttttaagggtttagaatagtatttggtataaaataggtgtttaaaaatatgtatgtaaaatagtggtttttggcggaggttgttagagttggttgtggttttatagagtaggaagaagtacgttttatttgtttgggtttcggttagggtgtcgagggttagtatggatattaggattagggcgtagattattttgttttttatggtggttattgttttttttttgttttaaaggcgatttcgagttagggatgagaggtcgttcgagtttcggattttatagggtaggttttgtttgtttaaagagcgttagataatatttgtttaaggaggttcggggattttttgagataataatttttattgatttttattaaaggtgttttttagatatggttaagttatatggaaggatttgttgatagatagagacgatatgtggtgaggttattttggttgagggatttgagatttagaaagttttttttttttatgggagttttttttaatttgattttaatttaggttttatttatatttgagaggttttttcgttagggtaaatattgtatttattgtagaagtgatttatagtgagagatggtcggaaaaaggtttggtcgtgataatagtggtttacggggtggttatcgtgattttgtagggggaagggaaggagtttatgaagtttatttcgtttaggtttaagttaatttttttatagtggaattgttttaataatgaaattgtaggtttggcgtagtggtttacgtttgtaattttaatattttgggaggttaaagtaggcggattatttaaagttaggagtttgagattagtttggttaatatggcgaaatttcgtttttataaaaaaaaaaaatataaaaattagttaggtatggtggcgggtgtttgtaattttagttattttggaggttaagttaggagaattatttgaatttgggaggcggaggttgtagtgagtcgagattattttattgtattttagtttgagcgatagattaagtttttttttgggaggggttgggggtaggagggagaaaaaaatagtatatacgagttgttattaaaaattgataaagtgaacgtggtttatttttttgtgtttatggggtttttttttttttttttttatatttttttagttggttttttggatttttgtattttagaggatagttttttgtttttttgtattatgttttattttttttttttgttcggagtttttttttttatagtttttattattttttggtggataaaataagtgattgatatattatgttggttatttatttattgtatttttttttgtagtagacgggagggcgtatgggagtagaagtttttattttttagtgttttgaggtggttttagattttagaatagtggttttgattggtattcgagaaatagttgttgaagagttgtatgaagaaatggataataggagaaatttttttttttttagtgagaaattaggttttgaggaaaatgtatgttagtttaataaaggtattatttttttttgggtgatttagttagtatatttttgtagtttttttgggaggggagtttgggttagaatgggggcggttatgttttttttcgttttattttaggatttagttttttttttagggttgttatttttgtatcggggtttttatttttgggttagggtttttaggaggggtttgatcgtaggatttagggaggggtcgaggtttggtgttttttgtggttagtttaagtttattgaaaataggacgggggtattaggtttagggtggtgtttatagtgacggtggttttcgttgttttaatttttcggattaaaatgggggtttttggaaatgggatgtaaattgtataattatttggagaaaaggtgggtagtgttcggtgaggtttaagttatatagattttatagtttagtaaatttttttgtttttaggtttggttttttaattttagaaatatgtttatatttgggtagaagaaaatataggtaaagatattttttttagtattgtttgtaatagttggaaatagggaaagaaggaaggaaggaaaggagggaaagaaaagtaaaataaatatttattaattagggaaagggaaaatgaatttaaaatataatgtagtcgttttttagtatttttgggggattggttttaggattttttatttagggatgttaaaatttataaatgtttaagtttttggtataaaatgatatagtgcgtagaaattacgtgtatttttttttatattttaattatttttaggttagttataatatttgatgtaatatttatattttattttattttgtagattttatatagtatttgatttgcggtatatttaagttttgatttttaagatgttgtaaataagattttaaaatattttttttttttgagatagagttttgttttgtcgtttaggttggagtgcggtggtatgattttagtttattgtaatttttattttttaggtttaagtgatttttttgttttagttttttgagtagttgggattataggtatgtgttattacgtttagttaatttttgtgtttttagtagagatagggttttattatgttggttaggttggtttcgaatttttgattttaggtgatgtattcgttttagttttttaaagtgttgggattataagtgtgagttattgtgtttagttggattttaaaatagttttgatttgatattattggaatttatggatgtagaatttatgaatatagagaattaattgtatatatgtattatattttatatatattatatatgtatgtatgtgagtattttttagaagatgaaaatgaataaataatgagaaatattgaaaataaagcgaagtgaaaaaattcgttaaaatggtttgtaaagtaggatattatttataatgtagatttttaaattatgtgaaataatgtgatatattgttggaattgtatttagatgaataaaatgatgatagtgtagataggaacgagatattgattttagtatgatgggtttgtttaggaaggaggaagtaggaaaaggtggcggggtagggcgtaaaggggttttcgatgttttcgtaatgtttttttttgttgaagaaaatttgagggaaataaggtaaaaaggttagtatttattaatgaggggtagcgtagatttacggatgttgttttagtattttgtatatgtttgtaattgtttttttggaaagtttagtttttatttttttgggagagttgtgagataattattaagtgtcggagtttggttttttatattagggttggagcggttggagttgttttcgggatttttcgtttttcgggataagagttttatttttgtgagagtgggcggaatttaagattatattatatataattttatttataaaaatttgttgaagataattttagtgtggcgagggagagaatgtagaggtaagcgttagtttattattagtgggggattttgtgttagtatttttatagttttgggttttagtttttttatttgaaagacgtagtggttgggttataggatatttgaagatttcgtattttagatttttttcggtaggtatttatggtcgtgggggcgtttgtggttgtgtaggtattgtttgttttttgcgtttagtcgatttttttgcggtttggcgagagttttttatttttagtggggggtttcgtagtcgtttagattttttataagggggacgcgtagttggggagttagtttttttttgacgttttttatttgttcgttgtttttgatttgtgttttggtaggagggggttttgtaggtggttttggagggagggaggagtttgggaggaagtggattcgggtttttttttaggattttttttgggattatttgggataggttacgttttttttttagttatagtttaggtgggcgttttttttatatattattttttttaggttttagagtagattttttatttttttgttttagtttggggggtttattagtcgtaaggagatttttatagtttttatttttttcgtattgtttagattcgttgtggtgaagttcgttttttgttaggtttttggttaaaaaagtaattgttattttagggattttttataaggatatttagttgaggttttggggtt

SEQ ID NO: 89 - DNA, 7001 bp, Artificial Sequence
  chemically treated genomic DNA (Homo sapiens)
aattttagggttttagttgggtgtttttgtaaagggtttttggggtggtagttgtttttttgattagaggtttggtaggaaacgggttttattatagcggatttgggtaatgcgaggagagtgaagattgtaaaagtttttttgcggttggtaaattttttaggttggggtaggggggtgaggggtttgttttggggtttggggaagatggtgtgtggagaggacgtttatttgggttgtggttgagagggggacgtggtttgttttaggtgattttaggagggattttggaggagagttcggatttatttttttttaaatttttttttttttttagggttatttatagaatttttttttgttaaggtataggttaggggtagcgggtaggtggggagcgttaggaggagattgattttttaattgcgcgttttttttgtggggaatttgggcggttgcggggttttttattgaaaatgaggggttttcgttagatcgtagggaggtcggttgggcgtaggaaataagtaatgtttgtatagttatagacgtttttacggttatagatgtttgtcggagagggtttgaggtgcggagtttttagatgttttgtggtttagttattgcgttttttagataagaaaattaagatttagagttgtgaaaatgttggtatagggttttttattgatgatggattggcgtttgtttttgtattttttttttcgttatattggaattgtttttaataagtttttatggataaggttatgtatggtgtggttttgggtttcgtttatttttatagggataaagtttttgtttcgagaaacggagagtttcgggggtagttttagtcgttttaattttaatgtgggaggttaaatttcggtatttggtagttattttatagtttttttaaggagataggagttgggttttttaagaaagtaattgtaaatatgtatagaatgttagaataatattcgtgaatttacgttgttttttattaatggatgttaatttttttattttattttttttagattttttttaataaaagaaaatattacggagatatcgaaggtttttttgcgttttatttcgttatttttttttgtttttttttttttagatagatttattatgttgaagttagtgtttcgtttttgtttatattgttattattttgtttatttggatgtagttttaatagtatattatattgttttatatagtttggaaatttatattataaatgatattttattttataaattattttaacggatttttttatttcgttttgtttttaatattttttattatttatttatttttattttttgaaagatatttatatatatatatatataatatatgtaaagtataatatatgtatgtaattagttttttatatttatgggttttatatttatggattttagtaatgttagattaaaattgttttaaaatttagttgggtatagtggtttatatttgtaattttagtattttgggaggttgaggcgggtgtattatttgaggttaggagttcgagattagtttggttaatatggtgaagttttgtttttattaaaaatataaaaattagttgggcgtggtggtatatgtttgtaattttagttatttaggaggttgaggtaggagaattatttaaatttgggaggtggaggttgtagtaagttgagattatgttatcgtattttagtttgggcgatagagtaagattttgttttaaaaaaaaaaagtattttaaaattttatttataatattttaaagattaaaatttgggtgtgtcgtaagttaagtattatgtagaatttgtagaatgaaatgaggtgtaggtattgtattaggtattataattaatttagagatggttaaagtgtaggagaggatgtacgtggtttttgcgtattatgttattttatattagggatttgagtatttgtggattttggtatttttgggtggggggttttgaaattagttttttaggggtattaagggacgattgtattgtattttaagtttattttttttttttttggttaatgaatatttattttgttttttttttttttttttttttttttttttttttttttgtttttagttgttataaataatgttaaaaagaatatttttgtttgtgtttttttttgtttaagtatgaatatgtttttgggattaagagattaggtttggaaatagaagaatttgttgagttgtaaaatttgtatggtttaaattttatcgaatattgtttattttttttttaaatgattgtgtaatttatattttatttttaagagtttttattttgattcgagaaattagagtagcgaaaattatcgttattatgagtattattttgggtttggtgttttcgttttgtttttaataaatttaagttgattatagaggatattaggtttcggtttttttttgggttttgcggttaggttttttttggagattttggtttaggagtggagatttcggtgtaggagtggtagttttggaggaggggttgggttttgggatggagcgaagaggaatatggtcgtttttattttggtttaggttttttttttagaggggttgtagaaatgtattgattaggttatttaagaaaagatagtatttttgttaggttagtatgtattttttttagggtttaattttttattgaagaagaaaagattttttttgttgtttatttttttatgtagttttttaatagttgtttttcgaatgttaattaaagttattgttttagggtttggggttattttaaggtattaggagatgaggatttttgtttttatgcgttttttcgtttgttgtagggaggagtgtaatgaataaataattaatataatgtgttagttatttgttttatttattaggaggtaataagagttatgaaagagaaagtttcgagtaggggaggggagtgaggtatggtataggagagtaggaggttgttttttaaaatataggagtttaggggattaattgggaaggtgtgggagggggagggagggagttttatagatataggggagtgaattacgtttattttgttagtttttgatggtagttcgtatatattattttttttttttttttgtttttagttttttttagaaggagatttaatttgtcgtttaggttggagtgtagtagggtgatttcgatttattgtaattttcgttttttaggtttaagtgatttttttgatttaatttttagagtagttaggattataggtattcgttattatgtttggttaatttttgtattttttttttttgtagagacggggtttcgttatgttggttaggttagttttaaatttttgattttaagtgattcgtttgttttggttttttaaagtgttgggattataggcgtgagttattgcgttaggtttataattttattattaaaataattttattgtaaaagaattagtttaggtttagacggaatgggttttatgagtttttttttttttttttgtaaggttacggtggttatttcgtgagttattgttgttacggttaagttttttttcggttattttttattatgaattatttttgtagtgagtatagtatttattttggcgggagggttttttagatatgagtaggatttggattaaggttaggttggaggagatttttatgggaaagagggattttttgaattttagattttttagttaagatgattttattatatgtcgtttttgtttattagtaaatttttttatgtagtttgattatgtttaggaaatatttttgataaaaattagtggagattattgttttagaggattttcgggtttttttaggtaaatgttatttaacgttttttaagtaaatagagtttgttttataaaattcggggttcgggcggttttttatttttgattcggggtcgtttttggagtagagaggaggtaatggttattatggagaataaggtgatttgcgttttggttttggtgtttatgttggttttcggtattttggtcgaggtttagataggtaaggcgtgtttttttttgttttgtggggttatagttagttttggtagttttcgttaggagttattgttttatatatatatttttgagtatttgttttgtgttaggtgttgttttaggtttttaaaagtatatttaatttataggatcggtaaaagtaggtggagagtaatttagggtggtagggttttcggagattttcgagaagtgcgacgaggagggggttgtttttagtcggggttgtttttttgtgttaggaagattatataatttttttaagtgttatgttttaaagaggaagtgttggcgtggggttttagaatagtgtttttgattgtttatgttaatattttttttaggggtagatttttttaaggtttatttagataggtttaaatgtcggttttagtgatggttatttgggagatttttttttataggttcgaatgttcgttttagtggtggttaattgggagatttttttttataggtttttgggtttttttgggatttatgttttgggagttaaagttattttttttatgagtgcgtggttggtaatttatattttttggtgttgttaagtggatcggttgttttgggtttttttagggagtggaggaggaggttatttttgtttttttgggaagtgtttgtattttaatttttttatttgtagaatggattaacggtttgttttagggttgttaggaaatgttgtgtggtagtatttgcgatttgtattttgttagttgtggggagttgaataatttatttgtcgttattaggtatagttttaaggtgggggtaggagaaagggttttttacgtttttaaagtaagggtttttagagaggtttgaagagggagcgtttagtggtgttgttcgtgtttttattgttttttagttattttttgatttttgttgtggggtatcgggtttgaggggtgggtttgggtagcgtagaagagtagttagtattgggttgtagtgggaagatttttaagtttatggtagggagcgggggagttttggaattcgagagaggaagtggtttcggtgtatagaacgaattgggtgggttttcgtgttggttatttttaggtttatttgtttgcgtttttgtttttattttagtttttagttttgttttttgtgttgtgggattatagaggtcgtggtaaatttttttttttattttatatattttttggtttaaggtttagagcgtttttgcgggttatttaggtttatgattttgttataattgaaatttagaaaattgtgattatagtttagtgtattcgtgtgtggaaattatttttatttatttttattatgcgataaagataaagcgggtgggtaagatagagtttgtcggaggtagagtatcggggttggaaatttttttttttgaggaggaaattttttcgatttttaggatgatgatttttttttattacggggttttttttgatttttatagtgtttcgggggtgggcgatgattatttttacgtcgcgatggatttagattttaggagggtaaggtttttatggaagttgttgggtagcgggagttgaatacggattttttttagtaagttaggaatattttttttaaagatatttcgaggtagtttttgatagtaaagtagataagagaatagtttttttcggttttttttggggcgtttttatttgagttagtgtggttagattgagtttttttttttttatgttttaaggtagggatagggatcggagggtgttttgggttttttttttattttttgttgtaggttgttaattattagattttaataggttgttttttgagatttttgatttcgcggagtttagagtttgaagttttggtgttagaattttttgtataagattttgcggtagtttttagttagttttatttgtttacgtgttttttttttttagatttttttttttattgttttgttttaagttgttttatagtttgtattttttgtcggttttttttagattattttattcggtttttttattttatttgtaatgggtttttattttttgaatatatttgggtttttggaatggtttttgtttatgcggttttatttttatttggtgaatttttttttgtagggagtttttttgttttgtttaatttgtttgttattggttttttcggggagtgttttattttcgtggttattttgggtattttgggacgatggttttgcgttgtttcgtatatgtttttgttttttttttttattagatttttagatttttttttttttttttttgagatggagttttgttttgttatttaggttggagtgtaatggtgcgattttggtttattataatttttgttttttgggtttaagtgatttttttgttttagttttttaagtagttgggattatagacgtgtgttataatgttcgtttaattttttgtatttttagtagagatggggttttattattttggttaggttggttttgaatttttgattttaagtgatttattttttttagttttttaaagtgttgggattataggtatgagtttgggtttagatatttagatttttattaatgatttttttggttttaatttttgggttttttttatttggtatagtgtttggtttttgttatgttagtttttattttttatgtatataaatggtgtttagtaaatatttatgtattgagtaaaatttaataattatttgttgaaattaaaaagtgaataaataagttatttagaaagatgtaaagtttataaatttggggtattttgtattttttttgagcgtaatgtttgtatattaggatgtgaggattacgttttttttttatgttttgagggttttatattcgttttattggatagttgttgatgttat

SEQ ID NO: 90 - DNA, 6499 bp, Artificial Sequence
  chemically treated genomic DNA (Homo sapiens)
tattgtatatttttatttataattggtagttaattattgaatatatatagatataaatgtattttaatatattattatttttatttagattttgtgtaatatttaattatttaattatattaataaataaaagtttttagaaattgatgtatttagtataattaaggggtaatttgtttatgattataggagttattttatttatattaatttgatgtgaggagataattaaatttttttttttttataagaaaaatttaattttgggaggtttaggtaggagaattttttgaatttaggaggtagaagttgtagtgagttgagattgtattattgtattttagtttgggtaataagagtgaaattttgttttaaaaaaataaataaataaaataaaataaaaagtaaaatttaatttttatattttttttttaaaaatattatattattgaaatagaatagaattttggattttaatgtttttatgttttttgataatgtaaagattatattaagaataatattgattttttgtgtatatgtgtgaaattatgttgagttgatgtatttagaaaagaaattgtagtgatattgggtatagaatttttaattttaattttttttttgttgtggaatagaaatttagttttattttttttgtttataatatataagagtagataattagatatgaggtgattaaatatataaattgattttatagttattatggaaagattataatatgtttggatgaggtgggggaaagagtttttttttgaattgagatttgaataggttttagatagattaaaaatttatggtttgttttttttaattttttattattgattatttgggagaattaaaatggtttggattataaagtgattataattagtagggtaggtatattaaataaaaatggggtgagtgtgtttggatgggaaaaattggggtgtagagaaatattttttgttttggaggttttgtttatagtgagtttgaggatgtagatgatatggaatatgagttttattaggatatatatttttttgtatagttttttttgattagtgttgtttattgttttaggtattatttttagttattttgtgttaggtatttaggatagttttgtttaaagtatgattgttttttggttagtgaagaaatagtaaagaaatgagagtttgtttttgaagtttttgtagtaatttaatatttttgtaatgttgtggtatatgttttatattttttaaaagtatttatttgtagattagaaataaaagagttttttagtatagatagtttgagagatgttattgtagagtgttttgggaggatgggatttttttagatattgatggttttttggagtggtgttggagtttgttgagatagggatgtggggattgttgtggaatagtatgttgtgaaaataggtatagatgggttgttgttatgtatttagtatttggtaggtttaggtattttgttttggggagatagagtaatagttgttatttttaaaaatgtgatataaatatgatttttgttttttattgtatgtgtatgtatgtgtgtatgtgtatgtgtggttggtgtgtgggtaaataatattggtgagggagttagtagtgtagagatgtagagatgaatttaatgaatttatatttggaggtttttgaaaggagttttgtgtatgtataattaggaagtagaagtgtagttgtaggttagttttattttttggtggaaatagtaaattatagttttagtattttttatttgtagtaaaagaaatgtatgttgtatttgggaggggtaggagaattttttagaatttggtgggtttattagttagggttgtgtagagaaatagaattaatgagataaatatgttagatagatgatagatagatagatagatagatagatagatagatagatagatagagatgatagatgatatagatagatgatagatgatagataatagatgatatatagatagatatagtaaatagatttatagatatgatagagagagaatgagagagatttatattaaagaattggtttatatgattgtgggggttgtaaattttatatttgtagaatttgttggtaggatggaaatttaggtaagagtggatattgtagttttgagttgaaagtttatagggtagtaagttggaaatttaggtaaggtttttaggttgtagttttaagaagaattttatattttttaggaaattttagtttgtgtttttagggtttttaattgattgaatgaagtataaatattatggaaggaaatttggtttatttaaagtttgttggattaagtattaattttaattaaaaaatgtttttatagtaatatttagattattgtttagttaagtatttgggtattatagtttagataagttgatgtataaaatttattattataagggaggaatttatatatatattttattgtagtaaaatttttatagtttaatgttttgtattttttttagaaggaaatgttttagtgtagagttgaatattgtatttttttgtagtttatataaattttatataattttgatttgttgagttttttttgaaaattggataatttaagtgtttatgaaaggttttaattgtttaagaaaatagattgtttgtgtgaattataaagaaaaagggattttagaaggaatattggtattttgggaagtaggttggggtaaggtttgtataagtgaattagaagttttaggtatgaagttagtatttttgttatggtttatgttagttgagtttttatttttgttttgtgtttggtttttagattttgtgagtttgttttgggatagggttatggttaatttagtagagattttggtaaagtattttgggaatgagagtgagaaaggtttaaagtagttaaggtttaaagataatttttgattttatttttttaaatgttagtttttaagattttaggttttttggattttaatttttatgttattttaaaggttttaaattttagttttagtagttttagtttatagttttaggtttttagagattattttagtaatttttaaatattattttagggatttagttttgatagttaagattattttttttataaaataattgtagatattaggtgaagatttttaaagttttaaggaaattttaaattttattttgaggatattgattttattaaagttttgaggaaattttaaattttattttgaggatattagttttattgttaggaattgggattttaatttatagtatttggattttgagaatagaggttttggggttaaatgggttgaatttagtattttatttttatgtttttgggtggatagtaatttttttttattgtgtttttttgtgggttttaggttttatatttgagggatgtggttttttttttttatattatgttggttaagaatgatttatatagttattatggaatattgtatggagataaggagtggttgtgtttttgtttgaagggtttattttatttatgaggtaggatgatttttaaggtagtgttatttattagagttaaagtttaggtaaggtgtttaggggttagttgtaatatgaagtatattagttaaggtagttttaaagagtattgttagaggaagaatttatatttggttgtttaatgaggttgaaaggtaaatttaggttaagtaggttaagtaaagaggttagtttagtattttgggaggtagaggtaggtggattatttgaggttaggagtttgagattagtttggttaatatggtgaaattttgtttttattaaaaatataaaaattagttgggtgtggtggtatgtgtttgtaattttagttatttaggaggttgaggtaggagaattgtttgaattagggaggtggaggttgtggtgagttaagattaggttattgtattttagtttgggtgatagagtgaaattttgttttaaaaaataaataaataaataaataaaaataaaaaagaagttagaaagtttatgaaaaatatttggagggaagaagttagtttaagaataaaagtattaggttagggtgtttaagatttttaaggattggttttggttgtgtagatatttaaagagattgtgtaaggttggataggagggtgagttggttaaaaaggtgatttgttaattgtggaattaattattgtttaatgttttggataattgagtttgatttgtaatggttaggtttattattgtaaattagttttgaagtataaataagtttattaaattattttttttgtttatatttttttttattttttgatttatgtaatttttgtagtttatatttaaataaaaaataataatatggatttgttattatgtatgttgtggtttatttttaattgtaaagtttttgattatttttttgttatgttgatttttatgttagaagaaaatgttttgttatttattatgagtgtagaaaattgtttattagaaatgattttaaatagtaaaggatgtatatttgaaataatagggttgtaatgaaaaagtatatattttttaattttatttaatatattgtatttgtagagtaaaagatatagaaaagtattttatgttttaaaaatgtaagtttgagagtgaaaaatagagataataaaaatttttttttaaatattattggtggaaaagttttaaagtaatagaaagtatatataaaatgtttgtgaatttttgtgtaataaaattatatatatatatgtgtgtgtgtatgtatatttgttttttttgttttgttttgtttttttttttttttttgagatggagttttgttttgttgtttaggttggagtgtagtggtgggattttggtttattgtaagttttgttttttgggtttatgttatttttttgttttagttttttaagtagttgggattataggtgtttgttattatgtttggttaattttttgtatttttagtagagatggggttttattgttttagtggggttggttttgattttttgattttgtgatttgtttgttttggttttttaaagtgttgggattataggtgtgagttattgtgtttggttaatgtatgtatatttgtaatttagatttgtaaatgtagttatatttatatttatatattaaatgtattaaaaagatttattaagttttttatagttagtttataaatttttagtttttttatatatttgtattttttgttttaatatgatataatagttaaaaaaatttaaaaattaataattaattaagttttttttttttgtagattatattagttattatttagaaatattaatttattgttttaaaaataatttttttagagatgtttggtatttagtatatgaaattatttataattgaataatataaataaaatagaaaaaagaatttatttttgggatatttgaagaaagtgatttataaatttagtttatttttgagttttattatttttaggaaaatggtttttatgttatttttatgttatgtttgatttgttttgtttgagtttgttttttagaaagattgtgatttttggtttgttgaatatgaaatttatatgattatttttgggaaaaattttttttttagtgattgtaagttaggttttgtggttgagaagtattagttgtatttggttgattgattgtattattttgtttttatgttgtttataaagatatatttgagatttggtaatttataaaagaggtttaatagatttatagtgttaagtgggtgggggtgttttataattatggtggaaggtgaaaggtatgttttatatggtggtagataagagaagagagtttgtgtaggaaaatttttttttataaaattattagattttatgagatttatttattattataagaatagtatgggaaggatttatttttatgatttaattatttttaattaggattttttataatatgtgggaattatgggaattataatttaagataagatttgggtgaggttatagttaattatattattgatttttattatattataaagaattattttgtagagagaatttgttttttatttttaataatttgtttattttggatattttatataaatagagttatataatatttgttgttggtttttttatttagtgtaatgtttttaaggtttatttgtgttagagtatgtatttttgttttatttttttatattattaaataatatttgattgtatggatgtgttatattttatttgattttttattagttgatagattgttgggtttttttattttttggttattatgaatgatggtattatatgaatatttatatataagtttttatgggtatatgtttttattttttttgggtatatatttaggtgggggattgttgttatatggtaattttatgtttaatattttgagga

SEQ ID NO: 91 - DNA, 6499 bp, Artificial Sequence
  chemically treated genomic DNA (Homo sapiens)
tttttaggatgttaaatataaagttattatatgatagtaattttttatttaggtatatatttaagaaagataaaaatatatatttatgaaaatttgtgtgtgaatgtttatatagtattattatttgtaatagttaaaaagtagaaaaatttaatagtttgttaattgataagagattaaataaaatgtggtatatttatataattgaatattatttagtgatgtaaaggaatgaagtaaaggtatatattttaatatagatgaattttgaaaatattatattaaatgaaaaagttagtaataaatattatataattttatttatgtgaaatatttagaataaataaattattagagatggaaagtagattttttttgtaagatagttttttataatatgatgaaagttagtgatatggttggttgtgattttatttaaattttattttgaattgtagtttttataatttttatatgttgtggagggttttggttggaggtaattgaattatgggggtgggttttttttgtgttatttttgtgatagtgagtaagttttatgaggtttgatggttttataagaggaaatttttttgtgtaagttttttttttttgtttgttattatgtgagatatgttttttattttttgttatgattgtgaggtatttttatttatttgatattgtgagtttgttaaattttttttgtaaattgttaagttttaggtatgtttttatgagtagtatgaaaatagagtaatatagttagttaattaagtatagttgatgttttttggttataggatttggtttgtagttattaaaaaaggaattttttttaagagtgattatgtaaattttatatttaataggttaaggattataatttttttggaaaatagatttaagtaagataagttaaatataatatagagatgatatagagattatttttttaaaaataatgagatttagggataaattgagtttgtaggttattttttttagatgttttaaaagtaagtttttttttttgttttgtttgtattatttaattataaatgattttatatattaagtgttaaatatttttagagaaattatttttaaaataatgaattaatgtttttgaataatggttgatatagtttataagaaaaaaaaatttggttaattattaatttttaaatttttttaattattatattatgttaagataaaaaatgtgaatatgtgaagaagttgggaatttatggattgattatgaggaatttagtgaatttttttggtgtatttgatgtgtggatatgaatgtggttgtatttataaatttgagttataaatatatatatattggttgggtgtggtggtttatgtttgtaattttagtattttgggaggttgaggtgggtagattatgaggttaggagattgagattaattttgttaaaatggtgaaattttgtttttattaaaaatataaaaaattagttgggtgtagtggtgggtgtttgtagttttagttatttgggaggttgaggtaggagaatggtgtgaatttgggaggtggagtttgtagtgagttgagattttgttattgtattttagtttgggtgatagagtgagattttgttttaaaaaaaaaaaaaaaaataaaataaaataaaaaaaataaatatatatatatatatatatatatatatatgattttattgtataaaaatttataggtattttatatatattttttattgttttgagatttttttattaataatatttagagaaaggtttttattgtttttgttttttatttttagatttatatttttaaaatataagatgtttttttatattttttattttatgggtataatgtattgaatgagattgagaaatatgtatttttttattataattttattattttaaatatatattttttgttgtttagaattgtttttagtaagtagttttttgtatttatggtgaatagtaaagtgtttttttttgatatgaagattagtatgataggagaataattagaaattttatagttagaagtaaattatgatatgtataataataagtttatgttattattttttatttagatatgagttatagagattatatgaattagggaataaaagaaaatgtaaataggaggggtagtttaatgaatttgtttatattttaagattgatttataatggtaagtttaattattgtgagttagatttagttatttaggatattgggtggtggttgattttatagttagtagattatttttttggttagtttatttttttgtttagttttgtataatttttttaagtgtttatatagttaggattaatttttggggattttagatgttttgatttaatgtttttatttttggattaattttttttttttaaatgttttttatgggttttttgattttttttttatttttatttatttatttatttattttttgaggtggagttttattttgttatttaggttggagtgtagtggtttgattttggtttattataatttttgtttttttggtttaagtaatttttttgttttagttttttgaatagttgggattataggtgtgtgttattatatttagttaatttttgtatttttagtaaagataaggttttattatgttggttaggttggttttgaatttttgattttaggtgatttatttgtttttgttttttaaagtgttgggttgatttttttatttggtttgtttgatttagatttgttttttaattttattaaatagttaggtgtagattttttttttggtaatattttttgagattgttttggttaatgtgttttatgttgtaattggtttttaaatattttatttgagttttgattttagtgagtagtattgttttgagggttattttgttttatgaatgggatgagttttttaggtaggggtatagttattttttatttttatgtaatattttatgatgattgtgtagattatttttggttaatatgatataaaaggaggaggttatattttttaaatataggatttaaaatttatgaggggatgtggtggaggagggttgttgtttatttgggggtgtgggagtgaggtattggatttagtttatttggttttgaagtttttgtttttggaatttgggtgttgtgggttgaggttttggtttttaatggtgggattggtgtttttgagatgaaatttggggtttttttggggttttggtgggattggtgtttttaggatgagatttagggtttttttggggttttggggatttttatttaatatttgtgattattttatgagaggagtggttttggttgttagaattggatttttggggtgatatttgggagttattggagtgatttttgaagatttagggttatgagttggagttgttggggttgaaatttggggtttttgaagtggtatggagattgaggtttagagagtttgagattttgagggttgatatttggagagatggggttgagggttgtttttgggttttgattgttttgggttttttttatttttatttttgggatgttttgttagaatttttgttggattggttgtaattttgttttggagtgggtttatagggtttgaaggttaggtatgaggtaaaggtaaagatttaattgatataggttatgatagaggtgttgattttgtgtttaaaatttttgatttatttatgtaagttttgttttaatttgttttttggagtattaatgttttttttaaaatttttttttttttgtaatttatataaatagtttatttttttaagtaattaaaattttttatgaatatttaagttgtttagtttttaggagaggtttagtaaattaaagttgtatgggatttgtatgagttatggaaagatgtgatatttaattttgtattgaaatgtttttttttgggaaaagtataaaatgttaaattgtaaagattttgttgtaataaagtgtatatataaattttttttttgtgatggtgaattttatatgttaatttatttgagttatggtgtttagatatttggttgaatagtagtttaaatgttgttgtgaaggtgttttttagttgggattaatgtttaatttagtagattttgagtaaattggatttttttttataatgtttgtgttttatttaattagttgaagattttaagaatatagattgaggttttttaaagaatatgaaattttttttaagattgtaatttagaaattttgtttgagtttttagtttgttgttttgtggatttttgatttaaggttataatatttatttttatttgaatttttattttgttagtaaattttatagatgtaggatttgtagtttttataattatgtgagttaattttttaatgtaaattttttttattttttttttgttatatttatagatttatttgttatatttatttatgtattatttattatttattatttattatttatttatattatttattatttttatttatttatttatttatttatttatttatttatttatttattatttatttaatatatttattttattggttttgtttttttatataattttgattaataaatttattaaattttaagaagtttttttattttttttaggtgtagtatatattttttttgttataggtgagaagtgttaaggttgtaatttgttgtttttattagaggatgggattggtttatgattgtatttttgttttttgattatgtatgtatagggttttttttaagggtttttaaatataaatttattagatttatttttgtgtttttgtattgttaatttttttattaatattatttatttatatattaattatatatgtgtatgtatatatgtatatatatataataaaaaatgaaagttatatttgtgttatatttttggaaatgatagttgttgttttgtttttttggggtagggtgtttgggtttgttaaatattgagtatgtggtaatagtttatttgtgtttgtttttataatatgttgttttatagtaatttttgtgtttttattttagtaagttttagtattattttagggagttgttaatgtttagaagaattttatttttttagggtattttatagtagtattttttaaattatttgtgttgaaggatttttttatttttagtttgtagatgaatatttttaaaaaatataaaatatgtattatgatattgtagaaatgttaagttgttataaaagttttaaaagtagatttttatttttttattatttttttattgattagaaagtaattatgttttgaatagaattgttttaagtgtttaatatagagtggttgaggatggtgtttagggtaatagatagtattgattagggaagattgtgtaggaggatgtatattttggtggggtttatgttttatattatttgtatttttaggtttgttatgaatgaagtttttaaaataggaaatatttttttgtattttagttttttttatttaagtatatttattttatttttatttagtatgtttgttttattaattgtaattattttataatttaggttattttgatttttttagatgattaatgatgggaagttgaagaagataggttatgggtttttagtttatttaaagtttatttaaattttagtttagagggagatttttttttttattttgtttaaatatattatggtttttttatggtaattgtgaaattagtttatatatttaattattttatatttgattatttatttttatgtattatgaatagagaaggtggaattaaatttttattttataataagaaggaggttgagattggaaattttatatttaatattgttgtaattttttttttggatatattagtttgatatagttttatatatgtgtataaggagttaatgttatttttgatataatttttatattgttaaaaagtatagaaatattgaggtttaaaattttattttattttaatagtgtaatgtttttaaagaaaaaatgtgagggttaagttttattttttattttattttatttatttatttttttgagatagagttttatttttgttgtttaggttggagtgtaatggtgtaattttggtttattgtaatttttgttttttgggtttaagagatttttttgtttaagttttttggaattaagttttttttataggaaaaaaggaatttgattgtttttttatattaaattagtgtaaatgaaatgatttttgtaattataaataaattattttttaattgtgttagatatattaatttttaaaggtttttatttgttgatgtaattaaatggttaaatattatatagaatttaagtgggaataataatgtgttaaaatatatttatgtttatgtgtatttaatgattagttgttagttataagtgagaatatgtagta

SEQ ID NO: 92 - DNA, 6456 bp, Artificial Sequence
  chemically treated genomic DNA (Homo sapiens)
taagaattttaagttattatttttgtgtatgtaggtagtattagtgttagtaataataagttagtttttttggtaaatttattaaaattaaattttaaatttttgaaaaaattaatatgtttattatgtttttgttagtttagaggtttaattatttgtgggggagggtttataattatgattaattatttatgatttgaaggtatttataaaagtatttgtttttttaagaaattattaaagaattaggtttaagattgtaaaattaattttaggggtaatagtaaattataggtttggggatttaattttgataatttttttttggaaagaaaagaattgttgttaattgtttttattttttgattttgtttgagtaaatatttgtagtttttaaaatttagaatttttagtttggttaagtaagttatggggattaatggttgttttaaggtagaggtagaagagaagaaataggaaggaaataaaaagggaatgaagatttgtagtttatgagggtgatattattaataatttttttaagtattattgaattttatggtttgtgattgagagttttttttgatattttataggttaattatttttaaggatttttttggttttagagtttgtaatgtttgggtttgaatatgatttgttttataaaaaaggttaggtgaattgatttttttttgtgaagttgttttatggtaagagattattaatttgttgaaatgtaaataattttttagatatttgaagtatttttaaatttataaagtgtttttatatatgttattttattttatttttatgattttaataggtaggtgttattattattttaatatgtaaaaataattttagaaaataatgtttttgtttttagtttataagaatatttttttgaaatttatagtatagaatttaagttatgggttagttagaaatgtttagaaatatattaattttaggaggataaattaagagaataggatggattagataaaatttataagtataatggtagaaagtgtgtttttggtataagaatggtgtaagttttgtaaataatagtgttatataggggtgtttttgtagtatttttatgtttggaaggatattatttatttatatatatgataagtatttttaattggatattttataggtaatagataaaataaaataagaatttttgttttaaaattgtagtggtggaatttattttttgggatgtattaggtgatttttttaggatgatagttgagttatagggggttaaatatattttttttttttttttttaatattataaagagttttaaaaatggattttgttgtttttaataaataaaatatatatgaaaaaaagttatttataggtttttatatataattttattttttaaaatatttatttttttttattagttaggttgaggtataatgtggttttaattttataattatttattgttttatttatatatttatgattttttgatgttttttagtttgagtttaaattgtgttgggaataaagtattgtataaattattagtttgggataagaggagataagttaaaattttttaagaagattttgtagatatttggtttttttgagtttgtagagagtttggtattttaaaggttagttttgggtttttttattttgatgattaatgttaaattgtttgattttttataaaaatatttagttgtgtttatttatattattttatttttagtgtatatagtaggtatgtatttgttgaatagaagttttaaatggatgagaaaaaagatatttttgttatatatttttttaagattgagaaaggtaaaattataatttaatttgtagaagtttttaggtatttttttttaatgtaaagttatgtatttttgtttaaaaaagaaaaggatgatataattaaataatgttaattatataatggggaaattttaggattattaagaaaatattattattttaagttatatatttttatttaatattggttattatataggagagagtaagaattgttgtttttttatttatttgtataatttatttgggaaaagtatgggtagaatatttatgatttaattatattatattttggatttatatttaattttttggagaattagtttaaagagtatgtttgtttagagatataaagtaaaatagatatagggataatagttttggaagaaatttttatgatgttgtttgagattgggtattagtatttaaattttttagattattaggagttatttttattatgtaattttaataaagagaaattgagagtatgattggtaaaaatattatgatgtttttgtattttgttaatttgatttatatttggttttatttataaagtttttattgattattatatggtatttttattttttagttttatttattttgttttttaaaaattttttaatggtatggttatgaaaaatatgtgggggttagtggggtatgttttaggttggtttattttgtttttaaaatgtatttattttttttagatttttttttagggtgggtagggagaaaatgtttttaagttgtatagttgtagggaagtttgtttaggttatgtttttttgatttgttttttggtttgttgtttggtaaggttattggttttggtttgtggttttgttgataaaatttaatttttattttgtaagattaataggttgtgtaggatttttttagttgttttttgttttgtatttttttgggtttgaggatttttggtttggttttttttgtgtgtgtgaggttttagatggtgagggtgtagttttttggtttatttgattatgttggggtgtttgaaggtttttaggtgttttagtattgttattttgtggatggtggagagtggtatgttttttttgttggtttgtatttgtatgtgttttaatgttatgaaatggtttttgttttttaagttgtgggttttgaatatttttttataggtgttttttttgatttttgttatgtatttgtattgttggttagtgtggtataggttgtttttttttatgttgtttggatgttgtttgttgtggtgttgttggggtgggtggggggtgtgtttaattagttggtggttgttgtttgtttattttggggttttttggagattggtttagttttatttgttttttgttggtttaggtgtttgggtgttggggtttttgttgttgtagaagttggatggagagatttttttgtggggttggtgtaattttggtgttgttgttgtgaaattttgtttgtagagttgttgttgttgttgttgttggaggagtgagttgatttttttttttttttttttgaagtgaagtttttaatatagatatgattatatagtttttgtttaagtgtgttttagtttagaattattgtatttaaaggaggagatgggaggataagaagaaagtgtaattagatagtttagaagttttttttggggtttttttagattttttttttttttttttatgaagtttttattgttattttttgtgtgtttttgtttttttttaagttgtttaattttttttggtttttttgagaaaagtgaagttatttttttttttttgtagggttgaagttgtttttgtgtggagaggttgtaggggttttttggggatgagtgagtggtgtgggatgtagtggaatgggagggggtgtgttgagtagtttagagtgtgttgggagtgtgggggaggggaggtgttgggtatgttaatgttatggtttaatatttatttttatattattgtgttgtgttgttattttttttgttttttgaggtttggatgtgtagggagatggggtttaggggtgttggagggtgtttaggggttgtgtataagttggagtggaaggattgtgggtttatttgtgtggggttgtagaatgtgggtgggggtttttaggattttgtaatttgatgttgggagtgtgtgagaaggggtggttagatatttgtttagaaattgttttttttttttttatttttagtttttttatgaggagatatttaaaaatgatttgtatatataaatggtttttttggggtaaaggagttttggttggaaatggaattttttttttggttgggaggatttttttggtggaaattttgggaagattagttatttggttggggagggttggggtttattgggggtgggtgagtgagtggttttgggggaggggagatattgttttttatgggattttaagggtgggagaaaggggtgtttgttataattttgtttgttgtttttttaaagaataattttaggaaggggatagtataattgtgttttgtttttaagttttaaattgattttgatttgagtaaaatttaattttttttttaaagggtggggggtggggggttaaattttgtgtttttaggggtgagagagaaggtttttgtttttggggtttggatttgtgaatttttttttatttttaggatttttttgttgtaggtagtagaggtggttgttttattttttttttggttaaaggtttggtttagtttgtagttggatgtttttggagttttttgtataataaagtgttagagtagggtattttaattttttttttttatttagtagttatttgggatttagggggttttttttttttagggttgttgtggttttggtaggatttttattatgatggttgtatgtttggaatttttggggtattttggaattatttgttttgtaattgttggtttgtttgttttttgttaggaattaaataaatggtgtgatttttatgatgagtgggtggagtggattgtggtgagagtagagtttttggtatttattatatttagaattttttttaaaagttgaggaaagagtttttagggattgtttgggggtttgagttaggttgagggttatataggtagttggggagttgttgttggttgtttaatttgtttgttttgtatttttttaatttttttttgtttgagtttagttttgggttttgtagtgaaggaagtgttggggatgttttatttttgtagggaattgtgtttgttgtttttgttgggttttgtattgttttggttttttttttatttgttttttagatggttggttttggtggagagaaatgggagtagtaatgtttttttttttttttttttttatttttttttgttgttgttgttgtttttttatgttggttgaatgtgatttgattttattttaaaaaaagtttgatatagtgttttaatatttttgtatttttttgtgattataaaggttgtagttgtttttttttgttttttgtttttgttttttgtttttatatttaatgaaattttttatgtgttttttttgaagtttgttaagtattataagggttgttattagtatagtgataagaggttatattggggattgtgatttttgtgtgtgtgtatatgtagatgtgtttatatgtatatggatgggtgtgttgtggggattagggttgtttattgtggggtgtgtgtttaattttaatattttaaattataaaagtaaatttggaaattatagtaaatgtgtgtttttgtggggttttaagtttgggtattggttggttgtgtgtatttttttgtgtataatatgtttgtaggaagtttgtgttaatatttattttgtggaggggaaggtggagtttatatttatattttagtgagttggagagggagtttttgagggggaaatgtaagtatattttttagtatggagtttttagaggtagtgtattttaaattttaaatgtgaattattatgtgagtgtttgagtagagttttagttttgtttggagaaattgtatgaggtgtgttttgtgtgggtgtgtgtgtgtatggatatgtggaagtaggattttggtgttgtgggtgtttttaggttgggattttttttttttattagataaggagaattttttagttttttaaaattggtttttataattaattttgttttagtttgtaaggggttaattaaagttgattttaaggaaatataggttttttttattttttgttattttttatttattttatttatagttttgttttggattttggttaattttttagattttttttgggattttttattttgtagtttatttatttgagtgtatagttttttatttgaggggtttagttgtgttgggttttttgagggggttgtgagtgttagttggttttttgtatgtgtttgtggttttgtggagtaggtaattagattttggggaaggagttattagtattttttttggtgagggggtgggtatagtggtggagggtggagggatggtggagggtgttgtttgtgttgtttgttgggggtggatgggggttgtt

SEQ ID NO: 93 - DNA, 6456 bp, Artificial Sequence
  chemically treated genomic DNA (Homo sapiens)
agtggtttttgtttgtttttagtgagtggtgtgggtggtgttttttgttgtttttttgttttttgttgttgtgtttatttttttgttggagagagtgttggtaattttttttttagagtttgattatttgttttgtgaggttgtggatatgtgtggagagttgattgatatttgtagtttttttgggaggtttgatgtgattgggttttttaggtgaggagttgtgtgtttgggtgggtgggttgtggggtggggggttttgggggagatttgggggattggttggggtttgaggtagaattgtgggtggggtaagtggagggtggtggggggtgggggggatttgtgtttttttggaattggttttggttaattttttatgaattgagatgggattggttatgggggttagttttggggagttagaggattttttttatttgatgagagggggagattttagtttagggatatttgtgatattgagattttgtttttatgtatttgtatgtatatatatttatatggaatatgttttatatagtttttttaaatggaattggaattttatttggatatttatataataatttatatttagggtttaaaatgtattgtttttagggattttatgttggagaatgtgtttgtattttttttttgaaaattttttttttagtttgttgaggtgtgggtgtgggttttatttttttttttatgagataaatgttaatgtaggttttttgtgggtgtgttatatatagaaaagtgtatgtagttggttagtgtttaggtttggagttttgtgaagatgtatgtttgttgtagtttttaagtttatttttataatttaaaatattggagttaaatatatgttttgtagtgagtagttttggtttttgtagtgtgtttgtttgtgtgtatatgggtgtatttgtgtgtgtgtatatgtgggagttgtggtttttggtgtggttttttgttgttgtgttggtggtgatttttgtggtgtttggtaggttttgggagaggtgtatgaaggattttattgagtgtgaagatagagagtagagatagaaagtagaaggaggtggttgtagtttttgtagttgtggaggaatgtggaaatgttgaagtattatgttaaattttttttgaaatggggttaagttatatttagttagtgtgggaaagtaataataataataaaaaaaagtggaggagagggggggaaaaggtattgttgtttttgtttttttttgttgaagttgattgtttggggggtgagtggggggagagttagggtagtgtggggtttggtgggggtagtaggtgtagttttttgtgggggtgggatgtttttgatgttttttttgttgtggagtttggggttagatttgagtgggagggggttggggggatgtaggataggtgggttgggtggttggtggtggttttttggttatttgtgtggtttttgatttggtttagatttttgggtagtttttgggggttttttttttggtttttaaggaaagttttgaatgtagtgagtgttagaagttttgtttttgttgtggtttgttttatttgtttattgtgggggttgtgttgtttgtttaatttttggtaaaaggtgagtgggttagtggttgtgaggtaggtaattttgaggtgttttgggaattttggatatgtggttgttgtggtgaaagttttgttgaggttgtggtggttttggaggagggaggttttttaggttttagatagttgttgaatggggagggaaagttagggtattttattttggtgttttgttgtgtagagggttttgggggtgtttggttgtagattggattgggtttttagttggagggggaatggggtagttatttttgttatttatagtggggaggttttgggaatgggaaaaggtttgtgagtttgggttttgaggatagagatttttttttttatttttggaggtgtaggatttaattttttattttttattttttgaaagggaggttgagttttgtttaggttgaaattagtttaaaatttaaggatgaggtgtgattatgttattttttttttgaagttattttttaaggagatgataagtgaaattgtggtgaatattttttttttttatttttgggattttgtgggggatggtgtttttttttttttaggattgtttgtttgtttatttttgataagttttaattttttttgattagatggttggtttttttaaggtttttattagggaggtttttttagttggagagagaattttgtttttaattgagatttttttattttaaaaagattatttgtgtatgtgagttgtttttaaatgtttttttgtagaaaaattgaaagtagaaagaaaggaagtaatttttgagtagatgtttgattatttttttttgtatatttttagtattgggttatagggttttgggagtttttatttatattttgtggttttatatggatggatttatagtttttttgttttagtttgtgtgtgatttttgaatgttttttggtatttttggattttgtttttttgtatgtttgggttttaggaggtggggagggtagtggtgtaatataatgatatagggataaatattaagttgtgatattgatgtgtttggtgtttttttttttttgtgtttttggtatattttgggttgtttggtatgtttttttttgttttattgtgttttgtgttgtttgtttatttttgaggggtttttgtaatttttttgtgtgaagatggttttagttttgtagggaaagaaaagtaattttgttttttttggaggaattaggaaggattaagtggtttgggagagggtaggagtgtgtggagggtagtgatggaggttttgtaaaggaggaggaggggagtttggaggaattttgaggaaggtttttgggttgtttgattgtattttttttttatttttttgtttttttttttaggtgtaatgattttggattgagatgtgtttgggtagaggttatgtaattgtgtttgtgttgaggattttgttttgaggagggaagaggagggattggtttgtttttttggtggtggtggtggtggtgattttgtaggtggagttttgtggtggtggtattagggttatgttagttttgtggggaggtttttttatttagtttttgtagtggtgaaagttttagtgtttgagtgtttgagttggtggggagtaagtaaagttagattgatttttggggagttttggagtaggtgagtggtggttgttagttagttgagtgtattttttgtttgttttagtggtgttgtggtgggtggtgtttaggtggtatggagaaggatggtttgtgttgtgttgattagtagtatgaatgtgtggtggagattggggagggtgtttatgggaaggtgtttaaggtttgtgatttgaagaatggaggttgttttgtggtgttgaagtgtgtgtgggtgtagattggtgaggagggtatgttgttttttattatttgtgaggtggtggtgttgaggtatttggagatttttgagtattttaatgtggttaggtgagttagggagttgtgtttttgttatttggggttttgtgtgtgtggggagggttgagttgggaatttttaggtttagaaaggtgtggggtagagggtgattggggaggttttgtgtgatttgttggttttatagagtgagagttaagttttgttgatagagttgtgagttagagttggtgattttgttagatagtgagttgaaagataagttaaaaaaatatgatttgagtaggtttttttgtagttgtgtaatttagaagtgttttttttttgtttattttgaaggagggtttgggggaagtgggtgtgttttagggataggataagttaatttgagatatgttttgttagtttttgtatattttttgtggttatgttgttggggaatttttgaaagatagagtaggtgagattggagaatgaggatgttgtgtgataattagtgggaattttatgggtggagttaagtgtaaattaggttaataagatgtagaaatattataatatttttgttagttatatttttagtttttttttattaaagttgtgtagtaagaatgatttttggtggtttaaggagtttgagtgttgatgtttaattttaaatagtgttataaaaattttttttaaaattgttatttttgtgtttgttttattttatatttttgggtggatatattttttagattaattttttaaagggttaaatgtgagtttaagatgtggtatggttagattataaatgttttgtttatgttttttttagatggattgtgtgagtgggtggggagatagtagtttttatttttttttgtgtggtaattagtattaaatgaaaatgtgtgatttaggataatggtgtttttttagtgattttggaatttttttattgtgtggttgatattgtttggttgtgttattttttttttttttaaatagagatgtatagttttatattgaaaaggaatgtttagaaatttttgtaaattgggttgtgattttattttttttgattttgagaaaatgtgtagtagaaatatttttttttttatttatttagggtttttgtttaataaatatatgtttattgtgtgtgttgaggatgaaatgatgtaaataagtatagttaaatatttttgtaaaaagttaaataatttaatattagttattaaagtggagagatttaagattgatttttgaaatattaaattttttatagatttagagagattaaatatttatagaatttttttgggaggttttaatttgtttttttttattttaggttggtgatttgtgtggtgttttgtttttaatgtagtttagatttaagttagaaggtattaaagaattataaatatataaataaggtagtaaatggttataaagttaagattgtattatattttggtttagttagtgaaggagaatgagtgttttagaagatgagattatatataaaaatttatagatgatttttttttatgtgtattttatttgttaaaaataataaaatttgtttttggggttttttgtgatattggagggaaaaggggagggtatatttagttttttgtaatttagttgttgttttaggggaattatttaatatattttgaaggatgaattttattattataattttaagatggaagtttttgttttattttgtttgttatttatggagtatttagttaagggtgtttattatgtatatgaatgaatagtgtttttttaaatgtagaggtattatagaggtatttttgtataatattattgtttataaagtttatgttatttttatattagaggtatattttttgttattgtgtttgtagattttgtttgatttattttatttttttgatttatttttttgagattgatgtgtttttagatgtttttaattgatttatgatttggattttgtattgtgaattttaggaggatatttttatgaattgaagataaaggtattgttttttaaaattatttttatgtgttaaggtgatgatggtatttatttgttaaagttgtgagaataaaatgagatggtgtatgtgaaagtattttgtaaatttgaaagtattttagatatttaaaggattgtttgtgttttagtagattgatggttttttgttatggagtagttttatagggaggggttaatttatttgattttttttgtagaataaattatatttaaatttagatattataggttttggaattaagaagatttttgaggataattagtttgtaagatgttagaaaagatttttagttatgagttatgaaatttagtgatatttgaggaaattattgatgatgttatttttatgagttatagatttttattttttttttgttttttttttgtttttttttttttgtttttgttttgaaataattattggtttttatgatttgtttggttagattaagaattttggattttagaggttgtgaatatttgtttagatagggttaggaaataaggatagttgatagtaatttttttttttttaagggagagttgttaaagttgggtttttaaatttgtgatttattattgtttttgggattagttttatagttttaagtttggttttttaatggttttttaaaagggtagatgtttttataagtatttttaagttataagtaattgattataattataggtttttttttatagatagttaagtttttaagttaataggagtataataaatatattagtttttttaaaagtttaagatttaattttgatggatttgttagaaaagttgatttgttattgttggtattggtattgtttgtatgtatagggataatgatttgaaatttttg

SEQ ID NO: 94 - DNA, 6257 bp, Artificial Sequence
  chemically treated genomic DNA (Homo sapiens)
ttatagtagtttttttgattggattaatttttttggatataatagtagggtaggggtggggtttggggagaaaggatatttttaattttgattttaatattttgatggtttttaaggttgtttgtatatttatttaggtgtaagttttttaaggtgtggtgtgatgaattagtgatttttggagttaggttagtgtattttttttttgtagggttgtaagttgtaggattgagaggtaggttgattaggttttgggttggatgatggggtgagagtaaggggttagttttgatatatgtttaatttttttttttagttttaagatattttgggtaaattgtttattttagtttttttgatttttattttaattttaatattagtttaagagaaaatagggatattgatggttatttagaagggttgttgtgttttatatatagtaatattttttgaatgtttgtgatagtggtttaaggaataagttaattttatattattattttggatatttgtataaaattttattttatttttattatatgaatgtgttagggttgtttttttgttttgttttttttttttttttttgagatagagttttgtttttgttgtttaggttggagtataatggtgtgattttggtttattgtaatttttgttttttaggtttaagtgatttatttgttttagtttttttgagtagttgggattataggtatgtgttattatgtttggttaattttgtgtttttagtagagatagggtttttttatgttggttaggttggtattaaatttttgattttaggtgatttatttgttttggttttttaaagtgttgtaattataggtatgagttattgtatttagttgtgttagggtttttttttgtttaattttttttttttttttgtttttttttttttttttaatggagttttattttgttatttaggttggagtgtagtggtaagattttagtttattgtaatttttgttttttgagtttaagtaatttttttgttttagttttttgagtagttgggattataggtgtttgttattatatttagttaatttttgtatttttagtagagatggggttttgttatgttggttaggttggttttgaatttttgattttgtgatttgtttgttttggttttttaaagtgttgggattataggtatgagttgttatatttggttaattttgtattatttttttaaagagagttttttaaattatataagttttaggttttataaaatttagatttgttttagtataattaaatttgggattatttattgagtaattattatgtgttaagtattgtgttgagtgtttttagagtattattttttttaattttagtatagtatgttagatgttgttttatagatgagttaattgagattagagatgtttagttatttgtttaaggtgatatgattgatatggaatagagttaagatttttttttttttttttgatatggagttttattttgttttttaggttggagtgtagaggtgtaattttagtttattgtaagttttgttttttaggtttatgttatttttttgttttagttttttgagtagttgggattataggtatttgttattatatttggttaattttttgtatttttagtagagatagggttttattgtgttagttaggatggttttgattttttgattttgtgatttgtttgttttggttttttaaagtgttggaattataggtgtgagttattgtgattggttagatttaagatttgaatttaggtttttttggttttagaggtttttgttttttaattttttaggatggtatagtaatttgttttataagaggtgtttgttttaagtgtgtttagtatatggaagtaagtttagaaatgtaagtgtatatttgtaaagaggtgtgggagatgggggggagggaagagagaaagagatgttggtgttttttattttttagtttttgataggtgtttttgatttttttttgattagtatagttgtatttttggttggggtattttaattagaattgttaaatttagtatataaaaataaggaggtttagttaaatttgaattttagataaataatgaataatttgttagtataaatatgttttatgtaatattttgttgaaattaaaaaaaaaaaaaaaagttttttttttatttttatttttattattaggtttaaggaatagggttaggggttttaaatagaatgtggttgagaagtggaattaagtaggttaatagaaggtaaggggtaaagaagaaattttgaatgtattgggtgttgggtgtttttttaaataagtaagaagggtgtattttgaagaattgagatagaagtttttttgggttgggtgtagttgtttgtggttgtaattttagtattttgggaggttgaggtgggaggattatttgaggttgggagtttaagattagttttattaatgtggagaaattttgtttttattaaaaatataaaaaattagttggttatggtggtatatgtttgtaattttagttgtttgggaggttgaggtaggagaattatttgaattagggaggtagaggttgtggtgagtagagattgtgttattgttttttagtttgggtaataagagtaaaagtttgtttaaaaaaaaaaaaaagtttttttgatgtgattgtttttttttaaatttgtagatttttttaagattatgttttttagatattttaaagattttagaagatatgttttgggggttttggaagttataaggtaaatataatatatttttttttttgattattaattttattagaggatgtggtgggaaaattattatttgatattaaaataaataggtttgggatggagtaggatgtaagttttttaggaaagtttaagataaaatttgagatttaaaagggtgttaagagtggtagtttagggaatttattttggattttgggggagggggtagagttattagtttttgtatttagggattttttgaggaaaagtgtgagaatggttgtaggtaatttaggtgttttggtgttaggagggatgtatttaggtttgtgtgaagagagggagaaagtgaagttgggagttgttatttttagatttgttggaatgtagttggagggggtgagttgggagtgtgtttgtttttaattataggagaaggaggaggtggaggaggagggttgtttgaggaagtataagaatgaagttgtgaagttgagatttttttttattgggattggagaaattaggggagttttttgggtagttgtgtgtttttttttatggggttttttattgtgttgtgtgtttggtttttattttttgtagtattttgtgttttgtgtttttttagttgggtttagttggagttatggggttggagttgtagtgagtattatggagttggtggttttgtgttgttgggggtttttttttgtttttttgttttttggagttgtgagtatttaaggtgggtttggtgtggggaggggatggagtagtggtgggattttgttttgtggatgttttgttgaggttttgtggttggtggggttagaggggtttggatgagtttttttattttgaagttgtggatagttgagatgtttagggtagttgggttttggggtttttgggtgggagggggtagttatatggtagtggtttgagatggtttatttaagagattggtgttttttaggttttgaggggttttgggaatttgttaaagaagttttttgaaattgtttagaaagtttttttgtaaagggtgtattgtgtagagtgtgtgtgtgtgttttttttttttttgagtttttttaagtttttttaaagtttttttagttggtagtttttgtttttggattggtttgggttggattttttgggggggttttttgttttgttttttttttagtttttttttgtttttttttagatgattttggtttggttgtttttgtttttggtggggttgggtgtgtgtgtgtgtggtggagtggagggtggtatagtaatttgttttaattagagttggggaggaaagggtggtttggagggtggttttttgttggggtttgggttgggggtgggggagatgtttgttttgaatagatttttggggttagtttagggattgtgttttgtgatttttggagtgtgtggattatggaggggtgggggtgggttttttggggtgtaaagtgggagagtttttagagaaggaagttaagaaataaggttagatgggagtttagggagggttgtgttgttttgttgttttttttttggtgttgtgtgtggggaagggtgagtgggggtagtgtgtattttgatttatttgtttatttgtgtgtattaattataaaagttaatatatagtttgggttaggtatattttgttaggaattgtttgtggtgttttgtatgtatttttttttaattttagaatatttttatagtggaagttttgttagtattttggattgagtagtagtttagaggttgagtagtagttagtaagtggtggggttaagatgggattttaggtagtgtgatttttaattatgtatttgaaattgttatatggatgagtgtatttggagtaatgagggatattgttttttgagttattgggttgtaggggagataaaatgaaagtgttttgggagttgtgggtggtttttataggttagagggtttggggagggagtgggtgttattgtggttgtgtgttgtttgaggggttttttgtgagtgagtgtatggttgtgttatttttgtaggtttatgttagggtgttttttagttgtgtggtttttgtatttgtgtgtttgggttttgtgttgttaaatagtagtttttttgttgatttggggatataggttgaattttgttttttgtaggaatttttttaaggtgttgggttagatttgttataaatagagggaggtagttttttatggttatgtttttttgttgaggaagaaggttttttttttttagggagtatatttttgttttttttgttttttagataagtatttttattttttattttttgatgagaagggtgaggttatattgagttgttaggttgagttgttgtttttttttattttgggttgggagttgattagggaatggtagttgttgtagagttggatttgagggttgggttttttggatggggtttttttatgtttttattttttaatttgtattattgattgtgttgtgtaggagttagttaaaaagttattgtatagtttgggtaataaggtaaaattttgtataaaaaatataaaaattagttggatgtgattatatgtgtttgtagttttagttattttggaggttgaggtaggaggattatttgagtttaggaagttgaggtttgtagtgagttgtgattgtaaatgttttttagtttgggtgatagtgtgagattttgttttagaaaaaaagtatattatttagttgtttttagtatttagattttatttaaggggtgaggtttggggtaggaatgtgggggaaggggaggtttagggggagttttagaggggttaggatttttttgaaatttttttttagaggtatgggttttataaattgtagtaaatatatttttttaattttgtagaatttttttatattttaattttagtatgatttttttaatagttttttttttttattatatttggggaaagtatttattttatttgttaagaaaaaaataattgaaaagatagggattaaatgtaaaaagaaaaaatatgtggtattttaaagttaaatataaagtatgtttaatttttttgtggtttgggattatttatatttttgttgtatgaatttgttttgttttaatttttaagaaatgtatggtgtattttttatatgttaggtttttatttatgtttttatttaatttttgtgatagttttgtgaagtaggtgtatagatgagaaaatggaagtttagagaaatgaagtaatttatttaaggtttttagttatttagtaatgtttagggaatttttggattttgaagaggaggtattaagaggtggttagagttttattttagttaataataatgggttgaataaagttttaggggtaggtaggtggttagatgggaggagaagtgttttttttgtttaggtgaatgatttttttatttatttttt

SEQ ID NO: 95 - DNA, 6257 bp, Artificial Sequence
  chemically treated genomic DNA (Homo sapiens)
gagaagtggatggaaaggttatttgtttgaataagaggagtgtttttttttttatttggttatttgtttgtttttaaggttttgtttaatttattattgttggttggaataagattttaattattttttaatgttttttttttagagtttaaaaattttttggatattattgggtagttgggagttttggataagttgttttatttttttgaatttttatttttttatttgtgtatttattttataggattgttatagagattaaatgaaagtatggataaaaatttagtatataggaagtatattgtatattttttaaaagttaagataagataggtttatatagtaggaatatgggtaattttaaattatgagaaaattaaatatgttttgtgtttgattttggaatgttatgtattttttttttttatatttgatttttatttttttaattgttttttttttgataaataaaatgagtattttttttaagtatagtaaagagaggaggttgttggaagaattatattggaattaaaatatgaaggagttttgtaagattaaaaggatgtatttgttgtaatttgtaaaatttatatttttaagaaaggattttagaaaaattttgatttttttggggttttttttaggttttttttttttttatatttttgttttagattttattttttgggtaaaatttgggtgttggaggtagttgggtggtatattttttttttgaaatggagttttatattgttatttaggttggagagtatttgtaattatagtttattgtaagttttaattttttgggtttaggtgatttttttgttttagtttttggagtagttgggattataggtatgtgtaattatatttaattaatttttgtattttttgtatagagttttgttttgttgtttaggttgtgtaatgattttttaattaatttttgtataatataattaatagtgtaggttgaggggtgaggatatgaggaggttttatttagagaatttagtttttaaatttagttttgtagtaattgttattttttgattaatttttagtttaaggtgaggaagggtagtagtttagtttgatagtttagtatggttttattttttttattagaagatgagaggtgaagatgtttgtttgggaaatagggagggtaaggatgtattttttggaagagaggaatttttttttttagtaagaaggtgtggttatagaaggttatttttttttgtttatggtagatttggtttagtattttaagggagtttttgtagaggatagagtttagtttgtgtttttaagttagtagagagattgttgtttggtaatataaagtttagatatataaatataaagattatataattgaggaatattttggtgtagatttgtagagataatatggttatgtatttatttatagagggttttttgggtaatatatagttatgatgatatttattttttttttagattttttgatttatggagattatttatgatttttagaatatttttattttgttttttttgtagtttagtgatttagggagtagtgttttttattgttttaggtgtatttatttatatagtgattttgaatgtatggttgggggttgtattgtttggggttttattttgattttattatttattagttgttatttaatttttggattgttatttagtttagaatgttggtagaatttttattataggggtgttttaggattaaaggagaatgtatgtaaaatattataaatagtttttggtagagtatatttggtttaggttatatgttagtttttatgattaatgtatataggtggatagatgggttaggatatatattgtttttatttatttttttttatgtatagtattaaggaaaaggtagtagaataatgtagttttttttaggtttttatttggttttattttttagtttttttttttgggaatttttttattttatattttaagaaatttatttttatttttttatggtttatgtgttttaaaagttatagagtatagtttttaagttggttttaagaatttgtttaaagtaaatgttttttttgtttttaatttagattttagtaagaggttattttttgggttatttttttttttttggttttggttgggataggttgttatgttattttttattttattatatatatatatatttgattttgttagaagtaggagtaattaaattaaaattgtttgaaggggagtggggaggggttggaggaggggtagggtagaggatttttttaaggaatttagtttaggttagtttggaggtggaggttgttaattggaaaggttttgagaaagtttgagggggtttaagaaggggggaaatgtgtgtgtgtgttttatgtaatatattttttgtgggaaaattttttgaataattttagagaatttttttgataagtttttggagttttttggagtttggaaagtgttagttttttggatgggttattttgagttgttgttgtgtaattgtttttttttgtttgagggttttagggtttggttgttttgagtgttttgattgtttataattttgggataggagagtttgtttgggtttttttggttttgttggttgtgggattttggtggggtatttatagggtagggttttgttgttgttttgttttttttttatattagatttattttgggtgtttgtggttttggggggtaagagggtgaggaggagtttttagtggtataaggttgttagttttatggtgtttattgtggttttggttttatggttttggttggatttggttgggagggtgtggggtgtggggtgttgtgaggggtgggggttgggtgtgtggtgtagtaaagggttttgtgggaaggggtgtgtggttgtttggggggtttttttggtttttttggttttaatggaggggaattttagttttataattttatttttatatttttttaagtagttttttttttttatttttttttttttttgtgattgggagtaagtgtgtttttagtttgttttttttaattgtattttaataagtttgggagtggtaatttttagttttattttttttttttttttgtgtaggtttgggtgtgttttttttagtgttgggatgtttgggttgtttgtagttgtttttatatttttttttggagaatttttaaatgtagaggttggtgattttgtttttttttttggagtttgggataaattttttaggttgttatttttaatatttttttaagttttaggttttattttaaatttttttggggagtttgtattttattttattttaagtttatttgttttaatattaaataatggtttttttattatattttttagtaaaattgatagttaaggagggggatgtgttgtgtttattttgtggtttttaggatttttggggtatattttttggaatttttgaagtatttgaaaagtatgattttaagagggtttataaatttgggaggagatagttatattgaaaggatttttttttttttttaaatgaatttttgtttttgttgtttaggttggagagtaatggtgtgatttttgtttattataatttttgtttttttggtttaagtgatttttttgttttagttttttgagtagttgggattataggtatgtgttattatgattagttaattttttgtatttttagtaaagatagggtttttttatgttggtgaggttggttttgaatttttaattttaggtgatttttttgttttagttttttaaagtgttggaattataattatgagtaattgtatttagtttaaaaagatttttattttaattttttaaaatgtattttttttgtttatttaaggaggtatttagtatttaatgtatttaaggttttttttttgttttttgttttttattagtttgtttaattttattttttaattatattttatttggagtttttgattttattttttaggtttagtggtaggggtggggatggaaggaagatttttttttttttttttaattttaataagatattgtatgggatatatttatattaataaattatttattgtttatttgaaatttaaatttaattgggtttttttatttttatgtgttaaatttggtagttttagttggaatgttttagttaagaatgtagttatattggttaagaagggattaaaggtatttattagggattggagaatgaaggatattagtatttttttttttttttttttttttttattttttatatttttttataggtatatatttgtatttttaaatttgtttttatgtgttgagtatatttaaagtaggtattttttgtgggataggttgttatgttattttagggagttgagaaataggggtttttgggattaagaggatttgggtttaaattttgaatttggttagttgtggtggtttatatttgtaattttagtattttgggaggttgaggtaggtagattatgaggttaggagattgagattattttggttaatatggtgaaattttgtttttgttaaaaatataaaaaattagttaggtgtggtggtgggtgtttgtagttttagttatttaggaggttgaggtaggagaatggtgtgaatttgggaggtagagtttgtagtgagttgagattgtgtttttgtattttagtttgggagatagagtgagattttgtgttaaaaaaaaaaaaaaaaattttgattttattttatattagttatgttattttgggtaagtgattgagtatttttggttttagttggtttatttgtaaaatagtatttgatatattatgttggggttaaaggagataatgttttggaagtatttagtgtaatatttggtatataataattgtttaataaatggttttagatttagttatattggggtagatttaggttttgtggggtttgaagtttatataatttgggaaattttttttaagaaagtaatataaagttggttgagtatggtggtttatgtttgtaattttagtattttgggaggttaagataggtagattatgaggttaggagtttgagattagtttggttaatatgataaaattttatttttattaaaagtataaaaattaattaggtgtggtggtaggtatttgtaattttagttatttgggaggttgaggtaggagaattgtttgaatttagagggtagaggttgtagtgagttgagattttgttattgtattttagtttgggtgatagagtaagattttattgaaagaaagaaagagagtaagagagagaaaggaattgaatagaaaaagattttagtatggttgggtgtggtggtttatgtttgtaattgtagtattttgggaggttaaggtaggtggattatttgaggttgggagtttggtattagtttgattaatatggagaaattttgtttttattaaaaatataaaattagttgggtatggtggtgtatgtttgtaattttagttatttgggaaggttgaggtaggtgaattgtttgaatttgggaagtggaggttgtggtgagttaagattgtgttattgtattttagtttgggtaataagagtgaaattttgttttaaaaaaaaaaaaaaaaaataaaataaaaaaataattttagtatatttatatagtaaggataaggtggagttttgtataggtatttagagtgataatgtaaaattaatttattttttggattgttgttataaatatttgagaaatattgttgtgtatggaatatagtagtttttttggatggttattaatatttttatttttttttgagttggtgttagggttagggtgaggattaggggaattgaggtaagtaatttgtttaggatgttttagggttagagagaaaagttgggtatgtattaaaattgattttttatttttattttattatttagtttaggatttggttaatttgttttttagttttgtagtttatagttttgtgggaagaggatgtgttgatttggttttaggagttattggtttattatattatattttggagggtttgtatttggatgagtgtgtaggtagttttagaggttattgggatgttaggattagggttagaggtgttttttttttttaggttttatttttgttttgttgttgtgtttggaaaggttagtttagttaggaaagttattgtgg

SEQ ID NO: 96 - DNA, 8467 bp, Artificial Sequence
  chemically treated genomic DNA (Homo sapiens)
atgaattaaatttttttttggtattaagaagggatatatagtattttgagttttgtttttgtttttttattaagttttttttaatagttggaagtggttgaagggggttgttttaaggagattttttgttttttttttgatagttgattaaaagaaaataggttatgttttttaaatttatgtttattttgtttttaattattgtttttttaaataaaggtaatatttgtgtaattttagttagtttgaatttttggaggtaaatagagtgtaatttgttttggaagaattttgttatgtttaaggttttatgttgggtgttggtttttttgtttttaattatttttttattttgatttggattgtagaaatttttaattttttgttttttagttttatttttatttttagatttggggttgttaaataatggaaattttaggaagatgtaggtgtggtttttaaagttttggtttgtgagtgtttttaggttggttggggtgttggtttttttagaaataaggtttgaatatgtaggtgttagttaggattttttgttgtttgtttattgttgttttttttttgggatttgagagaagtgggagtgtgtgtgtgtgtgtgtgtgtgtgtgtgtgtgtgtgtgtgtgttttgtgttaggagaaaggtttgtggttgttgttttagttggtttgtttattttttgtttttaggagaagtttgtttatttgggatattagtgattttttttatttttattttattggttttatattttttttatttttttttaagttgttgatgtagaaagtatttggttattttgaaatggtagtttttggaattttagttttgttttgtaatttagtagggttttttggaagttttataattgagatttatgggtttattgggtaattaaatgatgttattgtgttaattttgtatgtattattgttgtttgtgttgtttgtgggttgttggttggttgtagtttgttggtgatgagggtattatagttgttttgattgtgtagattatgtatgttttggttttgggaatttattatgtattagaatatattagtgtttgtattttaaaaggttaaattattggtttttagttagggatttttggtaagtggtttgttagtgatgagtgtttgtttatattggtatatagtggagttttttgtttttggtttatttgtttttaggaaagttttggggtgaggtgaaggtgattgaagtaatgtttttttttttagattgtagttgtttaggggggatatagtatggtattttttattgaattttttttgtttgtttgtattttagtttttttttttttagtgatttttttatttttttttttttttttttttttgatgtttgattttagtagtaaaggaggtaaaaaaggtattgagttgttagttaaatttgaaaagtgtggttttgttttttttatagttattggtagttttttgtggaaggtttgttttttggggtagttgtggttttggagtggttgtgtttggtgtttgttgggtgtggttttgttttaggtttgggagggtaggttggttgttttggtgagtggtagagtttttttggatagtttttgtttatttaaatagaagatgttggtgttggagtgggtttggatatggtgaggttgtgagttggtttgagtggtggggtttggtgatttttttttttttttttgttttttttttttttttgtatgtatgttttgtttgtttttattttgtttttattttgggtgagtttgtttgtagtttggggtgtatatttgtatgtgtatttttttttatttatttttgtgtttgtttttatttttgtagttgagttttgttatgtgtgttttgtttgtttgttggttgtttttgttgtttttgttgtttttgggttttgatggattgaatgaaggttgtttatattgtttattgatgttttattaaagatttagaaggttgtgttatgaatttggagttgataatggaaagtttgggtattttgtatgggttggttggtggtggtagtggtgggggtggtggtgggggtggtgggggtggtggtgggggtttgggttatgagtaggagttgttggttagttttagtttttattatgtgggttgtggtgttgttggtttgttgtggggttttttgttgtttttaattgtgtattaggagttgggtatggtggtagtggtggtagtggtggtgttgtgtttggttatggttattagtatggttttgattttggatggtggtgattattggtttgagttttttattttgttgtattatgttatgagtatgttttgtgatttgtttttgtttggtatgggtatgagtaatatttatattatgttgatattgttttagttgttgttatttatttttattgtgtttgataagttttattatttttatttgtattattatttgtattattattattattattattattagtgtttgtttggtaatgttagtggtagttttatttttatgtgtgatgagtgtgggtttttggttatgaataatttttatagtttttataaggagatgtttggtatgagttagagtttgtttttgttggttgttatgttgttgggtaatgggttaggtggtttttataatgtgtagtagagtttgtttaattatggtttgttgggttatgataaaatgtttagttttaattttgatgtgtattatattgttatgttgatttgtggtgagtaatatttgttttgtggtttgggtattttatttgtggttatgatgttgtatttgaatggtttgtattatttgggttatatttagttttatgggttggtgttggtatttagttgtgagtggttatttttgtttttattgggtttgtaggtggttatgttgggttagttggaagaaattaatattaaagaggtggtttagtgtattatagtggagttgaagtgttatagtattttttaggtgatttttgtgtagagggtgttgtgttggttttaggggattttttttgatttgttttggaatttaaaattgtggagtaaatttaaatttggtagggagattttttgtaggatgtggaagtggttttaggagtttgagttttagtgtatgtttgttttatgtttggtaggtaaggttggggttagttaggggttaggttgttgggaagagggttttgggtttggtgtttgtggtttaagtttgtgtgttgagttattttttttgatttttttttttttttttttatatatgttttttttttttttgtttttatttttttttttatttttttttttttttttgttttttttttatttttttttttttttttttttttttttttttattttttttttgtttttgagtttttattgattgatttttttttattttatttgttttttttttaatgtgttaatttttgttttatttttgatttttttaggtattgggaggtgggatgggggtgtgtgtttttttttaggagttttgtttttttaagatttatagaaattaggatttgtttttatttaaaattttatgtattttaagttttttttagataatatattttaattttttgggttgattagtttttttgtgtagaggtagttgagaggttttgttttgtagagggaaaagagttttttatttttttatttattatataggtaaatttatttggttattggttgaaggtatagttttgtttttgtggggaattggtggttaggatataatagtgtttttggagtttatttttggttttggtgttggtgtagggattttttgattgggtttgaggggtttgggttagttttaatgttattatttatagtgagggtagggtgtaaggttgagaaggttatatttattgttttgggaggatgtgggagaagagattgaggtggaaagtgttttgttttgtttattggttgtttttgttttggttttagtgtttgttgggatttgttaggatttgttggggttttgggagattttgagtatttgtaggaagaggtgttgagaaattaaaaatttaggttagttaatgtatttttgttgttggttgtaggttttgtttttgtattaagtgggtgttgattgtgtgtgtttggtgattgtggggaggattggtggtttgtgggaggggatgggtagaggtgtgggttatattgttttggagttggtttggttttttgtgttttttttagtggttaagttgtgaggtatagttttttattgttttaggagtatagaaattttttgtgtgggtggtgggtgtgtgagttagagggaaagatgtagtagttattgtgattggtatgtagttgtgtgtttttgtgtgtatggattttgtgtggtgtgtgtggtgattgtgttgtttttaggagtaagttatgggtttagaggggtaaaatgtttaggttttttgttgggaaggatatattatattttatggtaagttagggtgggtgattttttatggattgggtggaggggggtattttttaggattggtgggtggtttaggggaataatttgtggtggtgatgatttgtatagtgtgggttttgggatgtgtgtggttttgagttagttttgtatagtttgtttttggagttgtgagtttaggtttttatttttgattttttgggttttttttgtattgttgagtttagtttgtggggtgtatttgattaatgtttgatagggttggggaatgtgataggtagtaggtttatttgggtttggggagggggagtttttgttttgatagtatttttttttgttgtttgttggtggatttttatttttagttggtaattgttttgtagtgttgatttaagaaggtaaagaaaattaggtttttttgtaaagagttttttttaaattggtggattttggatattttgagtggatttagaaatttatgtaattttttttttttagtttattttttatttttttttatagttttttttgatttgttgttggtttggggtaagataaagtagttagtagagagtgataataatagtggtgggaaatgaattggagattggttgatagtttttaatattttgttatagatttttttgaatgttttaggttgtttttggtgggttttagtatttgttggttttttgggtattggggattagaaggaatttggtagttggttttaggggtatagttaaaggtaggatgatagttatttttttgtttattttagagtgttgttgtttttttatgttggttgtgtaaagaatatagtttttaaaaaatatgtgttttttgtttatataggtttgaaagtgatgaggaaagtaatgttttgtttattagtgagttttagtttttaaaatgattttaagtgttgttgagatgagaaagtgtggtattttgggggtttttagttttatttgtgtttatggtgtaagtttgtagggataggtttgggatagtattgtttatgttgttagattttttgtagaggattgttgaagttgtttttgtgggagatagaatgttttttttagtgagtggaaaaggtttgttgaggattttgttttgtttgagtatttaaatgtgtgtttgttttattattttgggttgaaaagggataagagttttagtttttttatttggttattttattagtaattataagtgtgttgagtggttattattatataggaggttttttagtttggggttagtagattagtttttttagatattgatgtagaagttgggattggtaagtaggtattatgtgtttggagtgttaggggataggagtaaatggagaagaaaagtggaggttttttttgtttggagtattgattggaatttttgttggtatgttgtagagggtttttgttgttgggttttgggggtttaataagtttagttgttttgtaggtggtttggttggatttttagattggtgtttggaagatattgtttttgttttttttttgttaaatttgtttttttttttttttttataggttataggtttttttttttttttattttggttttgtttttgggttttgttaaatagttaagtaggttggggtttagggggtttagaatgaagaggtttgatttggttagtgttggtaaagtttatttttaggtgaggttataatagaggtaggttttttttgtttagtttgttggtgtagttatagttaagggtggtatttgaaaggaaaagggagaaaattttggagaaatttagattgttttaatgttagattttagagaaattgattttaaatgtatggatttgtttggaaagggtggttaagtggtaggtggttgtaattttgtttggttgggtttttgtagaggttttttaagattagtttttgtagggtggtttttagtaatttgataagaggtggttaagataaatttttgtgggtttgagtatatatttttgggtgttgggttttagagatttttaaattaagtataaataagaagggagtgagagaatttaggttagaatttgtatgggtattttattgaggaaaagtgaggttttggtggtaggtatgtttttttttgatgtttgaaaattgagttgagtgtttgattatatttattgtagaggtttttgtttttagtgagtttggattttttagtggtttgtttggagttggtttttagtttttgttgtagtttgatgtatggtttttttttggtagtaagtttttagtggttagtttgaagttaattttgtttaggtggttgagggtttttagttaatttattatgatgttgtttgggttatttgatgtttgtagtggtgggatatggtttgggtagtgtgtagtggtttttgttaggggtattgtgtgtgtgtttgttttttgttgtgttggggatgtttttgggtgatatgggttgttgggtattttttaagttgaggaaatggattttttttgtagagttttgtgtttattttttaattttttattttgttttttgttgttagggtttttgatttagtttattttttttggtggtttagttagggattagagttggagaggttgaatgtaatttgtgttagtatggaatagatgatatgtttgtttgttagttgtttggatgaataattgaaaagtttgttgtagtttgtgttttgttaagttttgggtgttgggagaatatttttttaatatgtattagggtgggtgggagtgggtagaggaggtgggatttgagggaggagagtgaatttgagtaggagaagtagtttaggtagttaggtgtttttgatgtgagaggttgggtatttatttttattttaggttttttattgtgtggttatgttatttttttaaataaatgtgtatatggagggagattgatgttgataatgtttagaagattaaaagagtattaatgttggtaataataatgtaaatgtgtggatttagattttattgatttggaatttgatttggtgtgtttttagtaagtttgatggtgtgttttttttagtagagtgtttattagtgttatggttttgtggttttttagtggtgttgttttgttagttttgtgtgggtttttttgtttgattgtagttttttttttgtgaggttttagtttgttttatttttttgaggtttttttttttttttgtggggttttttgttttttgtatttttttttttgatttttgtattatttgtttttgtgtgtatatattgttatttgtgtttttggtgatttgtttgggtggttgggtttgtgaagttaatgtgttgaatggtgtttgagtttttttaattattttgtgtttggttgttgttattgggttttggtgattaagtttaagtttgaaaatgatgtggttaaagttgtttgttaatggtagagtttaattagttgtagatttttttttatttttattggtttttgtattaaaaaggtttatgtgtagattttttatgtaggtgtatttgttggataattaaatgtggttttagtaataaaagtttgagttttatttttttgagtagtaggttttgtgttggattggttgggtttaatagggagaattttgtgttttattttggttgggataggaagtaagagaagtaaattggggaatttttgttttatttttttttattttttggatgttttgggttgaggtttgggttattggtttattgtgggtaaggaggtgttttgtggaatatttgtattgattggaaaagaaagaattttaaagttttttttttttgtttgtgggggatattattatattttgttaattatttttttggttaaatggtggtttgtttttttagaaggagtattaaggtgaattttatggaaaaaaaataaaagattagggatttaagtgggagtaggatgagaattaattttt

SEQ ID NO: 97 - DNA, 8467 bp, Artificial Sequence
  chemically treated genomic DNA (Homo sapiens)
aagaattagtttttattttatttttatttaggtttttgattttttattttttttttataaaatttattttagtgttttttttggaaaaataagttattatttggttaggggagtggttggtagggtgtggtggtgttttttataagtgggaaggaagagttttaaagtttttttttttttagttaatgtaggtgttttataggatatttttttatttgtgatgggttagtgatttgggttttggtttaggatgtttagggggtgggaaggggtggggtaggggttttttagtttgttttttttattttttgttttagttaaggtaggatataagattttttttgttagatttgattagtttagtgtagagtttgttatttggagggatgaagtttaggtttttgttattagggttatgtttaattgtttaatgaatgtatttgtgtaaaaagtttgtgtgtgagtttttttagtatgagaattgatgaggataggaggggatttgtggttgattaagttttgttgttagtaggtagttttagttatgttatttttaaatttgggtttagttattagggtttagtggtaatggttaagtataggatagttaggaagatttgggtattgtttagtgtattggttttgtggatttagttgtttaggtggattgttggaagtgtaagtagtggtgtgtgtgtataggggtgggtggtgtagaggttgggggagggggtgtagagggtagagagttttgtgagaggaggagaaaattttggggaagtaaggtgggttggggttttgtgggggaggagttgtggttagatgggagaatttgtgtagagttggtgaagtggtattgttggaaaattgtggggttgtggtgttggtgagtgttttgttgggaagagtgtgttgttgggtttattggaaatgtgttggattaagttttagattaatgaaatttgggtttatatgtttatgttattgttgttagtattaatgtttttttaattttttaaatattattagtattgatttttttttatatatatatttgtttgagaaagtgatataattatatagtggaaagtttggaataaaaataaatgtttagttttttgtattgagggtgtttggttgtttgggttgttttttttgtttgggtttattttttttttttgggttttgttttttttgtttgtttttgtttattttgatgtgtgttgggaaggtgtttttttggtatttgggatttgatgaagtatagattgtagtgaattttttaattatttatttaagtagttagtaggtaaatatattgtttgttttgtattggtatgggttgtgtttagtttttttagttttgatttttaattaaattgttaggagaggtgggttgagttgggagttttagtagtgagaaatgaggtgggaggttggggggtgggtgtgagattttgtgaagggggtttgtttttttggtttgggaggtgtttagtggtttgtgttatttaaggatgtttttggtgtagtgggagataagtatgtatgtggtgtttttagtaggagttattgtgtattgtttgggttgtgttttgttgttgtgggtattaggtggtttaggtgatattatggtgggttggttaagggtttttggttgtttgaatagaattggttttagattggttgttgggagtttgttgttaggagagggttgtgtgttggattatggtggggattggagattagttttgggtaggttgttgggggatttgggtttattggaggtggaaatttttgtagtaaatgtagttgggtgtttggtttgatttttgggtgttggaagaaaatatgtttgttattgaggttttgtttttttttagtgggatgtttgtgtaagttttagtttgggtttttttattttttttttgtttgtgtttggtttagaggtttttggggtttaatgtttgagagtgtgtgtttgaatttgtagaaatttgttttggttgttttttgttaggttgttgaaaattgttttgtaagggttggttttggggaatttttgtgaaggtttgattgggtggggttgtaattatttgttatttagttgttttttttgaatgaatttgtgtatttggagttaatttttttgaaatttaatgttggggtaatttaaatttttttgaagtttttttttttttttttttaagtgttatttttggttgtgattatattggtaggttgggtaggaaggatttgtttttgttgtgattttgtttaagggtgagttttgttggtgttggttaaattagatttttttattttgagttttttaaattttggtttgtttggttgtttggtaggatttgggggtggggttaaaatgagagagaaagggaatttataatttatgagagaaagagaagaggtaggtttggtgggaggggggtagggatggtgttttttaggtattggtttgagagtttggttgagttgtttgtggagtggttgggtttgttaaatttttggggtttaatggtgagggttttttgtggtgtattggtggggattttgattgatattttgggtggagaaagtttttgttttttttttttatttgtttttgttttttagtgttttgagtatataatatttatttattagttttagtttttgtattagtgtttgaagagattgatttattgattttaaattgaaaagttttttatgtaataataattatttaatatatttgtagttgttgataaaatggttagataaaaaggttaaagtttttgtttttttttaatttagggtaataaaatagatatatatttgaatgtttgagtaaagtggggtttttagtaggttttttttatttgttggaggaggtattttgttttttatgaaggtagttttagtgattttttgtggaaaatttagtagtgtgggtagtgttgttttgggtttgtttttgtagatttgtattatgggtgtgggtggggttgaggatttttgggatgttatgtttttttattttagtaatgtttgggattattttaaaagttgaaatttgttaataggtgaagtattattttttttattatttttagatttatatgggtagaaggtatgtgttttttaaaagttgtgttttttgtgtgattggtatgagggggtggtagtgttttgagatgagtaggagaatagttgttattttgtttttaattgtatttttaagattagttgttaagttttttttggtttttggtgtttaagaagttggtgggtattaaaatttattagagatagtttgggatatttggggggatttatgataaaatgttaagaattgttagttagtttttagtttattttttgttgttattattattgttttttattggttgttttattttgttttgaattaatagtaaattagagaaaattgtaggagaggatgaaaaataaattaaaggagaaagattatataaatttttaaatttatttaaagtatttggagtttgttgatttgggggaggttttttgtagggaaatttagttttttttatttttttagattaatattgtggggtgattattgattgggaataggaatttattagtagatggtaaaggaaaatgttgttaaagtggaaattttttttttttaagtttgggtgaatttgttgtttgttatattttttagttttgttgggtgttggttgagtgtattttataagttgggtttagtggtgtgaggaaagtttgggggattgggggtggaaatttgagtttgtagttttggaagtgagttgtgtgaggttggtttggaattgtgtgtattttaagatttgtgttatgtaaattattgttattatgaattgtttttttagattgtttgttgattttgaaagatatttttttttatttgatttatgggaagttgtttattttggtttgttatagggtatagtgtgttttttttagtgggggatttggatattttgtttttttgggtttgtggtttgtttttaggggtagtgtagttgttatgtatattgtgtggggtttgtgtgtataaaagtgtgtaattgtgtgttagttgtagtaattattgtatttttttttttagtttgtgtatttgttgtttatataggaggtttttgtgtttttagaataatagagggttgtattttgtagtttggttgttagaggaggtataaagagttgagttggttttagaataatgtaatttgtgtttttatttgtttttttttgtgggttgttagttttttttgtggttgttaggtgtgtataattagtgtttgtttaatgtaaaggtggagtttgtagttggtggtagggatgtattaattaatttgaatttttaattttttagtatttttttttgtgagtgtttagggttttttggagttttggtaaattttggtaaattttagtaaatgttgggattggggtaaggatggttggtgagtaaggtaaagtgttttttattttagtttttttttttatgtttttttaaagtggtgaatgtgatttttttaattttatattttgtttttgttgtaggtagtgatattggagttggtttgagttttttaagtttggttagaaagtttttgtgttaatgttaaggttagagatgggttttaggagtgttgttgtattttggttgttggttttttgtgggggtaaggttgtgtttttagttaatgattaaataagtttgtttatatggtgggtgggagagtagagagtttttttttttttgtagagtaaagttttttaattgtttttgtatagggagattagttagtttggaaaattgaaatgtgttgtttaaaagagatttgaagtgtatggggttttgaataagggtaggttttggtttttgtgggttttggaaagatagggtttttagaggaaaatgtatatttttattttgttttttagtatttgggaagattggaaatagggtaaaggttggtatattgaggggagggtgaatgaaatgggggggggttggttaatgaaagtttagggataaggagagagtaagaaagaaaaagaaaagggagaagggaaagtaggggaagagtggaagagaaagagaaaatggaagaagaaataaaaatgagaagaaagaggatgtgtataggaaagagaaggaaagaattaagagaagtgatttggtgtgtagatttgggttataagtattggatttggagttttttttttagtagtttggtttttggttagttttggttttatttgttaggtgtaaggtggatatgtgttggaatttgggtttttgaagttatttttatattttgtggaaggtttttttgttagatttgagtttattttatggttttggattttggagtaggttggagagagttttttgagattggtatagtattttttgtgtaaagattgtttgggggatattgtagtgttttagttttgttgtgatgtgttgggttatttttttggtgttgattttttttagttggtttgatgtggttatttgtgagtttgatgaggatgagggtggttgtttgtgattgggtgttagtattggtttgtgagattgagtgtggtttgggtggtgtaggttgtttaggtgtgatattatggttgtaggtggggtgtttaggttgtgggataggtgttgtttattgtgggttagtatggtagtgtggtgtgtgttgaagttggggttgagtattttgttgtggtttggtggattgtagttgggtagattttgttgtgtgttgtggaggttgtttagtttgttgtttagtggtgtggtggttagtggggataggttttggtttatgttgggtatttttttgtagggattgtagaggttgtttatggttgggagtttgtgtttgttgtgtatgagggtgaagttgttgttgatgttgttggataggtgttggtggtggtggtggtggtggtggtgtggatggtggtgtgggtgagggtggtggaatttgttagatatggtggagatgggtggtagtggttggagtggtgttagtgtggtgtaggtgttgtttatgtttatgttaggtggagatgagttgtaggatatgtttatggtgtggtgtagtgggatggagagtttgggttggtagttgttgttgtttaggattgaggttatgttggtgattatggttgagtgtgatgttgttgttgttgttgttgttgttgtgtttagtttttggtgtgtggttggaggtggtggagggttttgtagtgagttagtggtgttgtggtttgtgtggtgggggttggggttggttagtagtttttgtttatggtttgggtttttgttgttgtttttgttgtttttgttgttgtttttgttattgttgttgttggttggtttgtgtaaagtgtttagattttttattgttagttttgggtttatggtgtagttttttaggtttttggtgaggtattgataggtggtgtaggtagtttttatttagtttattagggtttgggggtggtgggggtggtgggggtggttggtgggtgggtaaggtgtgtgtggtggggtttggttgtgggagtgggggtgggtgtgggagtgagtggagaggagtgtgtgtgtgggtgtgtgttttgggttgtgggtgggtttgtttggggtgggggtggggtgggggtggatggggtgtgtgtgtgggagaggggaggggatggggagggagggagggattattgggttttgttgtttgggttggtttgtagttttgttatgtttgagtttgttttggtgttgatgttttttgtttgggtgagtgggagttgtttagaagggttttgttgtttgttggggtagttaatttatttttttggatttggggtggggttatgtttgatgggtgttaagtgtaattattttgaggttgtagttgttttgggaggtgggttttttatgggaagttattagtggttgtggagggggtggggttgtattttttaggtttggttgatggtttggtgttttttttattttttttgttattggaattaaatgttaaggagagggagggaggagaaggtgggggggttgttggggagagggaggttggagtgtgagtgagtgagagagatttggtgaaagatgttgtgttgtgttttttttgagtagttgtgatttgggggaaggggtattgttttaattgtttttgttttattttaaagtttttttggaggtgagtaagttgggagtaaaagattttgttatgtgttagtatagataaatatttgttattaataagttatttattgagagtttttagttgggagttaatagtttagttttttaaaatgtaggtgttaatgtattttaatgtatggtaaatttttgaggttgggatatgtataatttatgtggttagagtaattgtagtgtttttgttgttagtgagttgtggttggttggtggtttatgggtggtgtgggtagtagtaatgtatgtaaagttaatataataatattatttaattatttggtgagtttataaattttagttatgaggtttttgaagagttttgttagattgtaaaataaaattagaattttgggagttgttgttttaaggtgattaagtgttttttgtattagtgatttggaaagaagtggggagagtgtagaattggtgaggtggaggtgaggagggttgttggtgttttaagtgagtaaattttttttgggggtagagagtaagtaaattagttgagatggtaattatggattttttttttaatatgagatatatatatgtgtatatatatatatatatatatatatatatatttttgttttttttaaattttgggagagaaatggtggtgggtagatgataaggaattttggttgatatttgtatatttaaattttgtttttgaaaagattagtgttttggttagtttgagaatgtttataagttaaggttttaaaaattgtatttatgtttttttagaatttttgttgtttggtaattttaggtttggaggtgggagtggaattgggggatagagagttggagatttttgtagtttgagttggggtggaggggtagttgaagatagagaggttaatatttggtataaagttttaaatgtaataagatttttttaaagtaggttgtgttttgtttgtttttgaagatttaagttagttgaggttgtgtagatgttgtttttgtttaaagagatagtaattaaggatagggtggatataagtttgagaagtgtgatttatttttttttgattagttgttaaaagaagagtagggggtttttttaagatagttttttttaattatttttagttgttagagaaaatttgataagaaaataagggtagagtttggaatattgtatgtttttttttggtgttagagaaaggtttgatttat

SEQ ID NO: 98 - DNA, 4453 bp, Artificial Sequence
  chemically treated genomic DNA (Homo sapiens)
ttggttttgaagtttatagtattgttgatttagtttgttttttggaaggttggtagtttagtaagtatagaagtttttttagaagatagtgggttatttgttttttaaaagttgaaaggttaatttgtattttttttagtaggtagttggtattttgagtttttggttggggtagagtaaaggagttttttttttttttatttttttggtattttttttgttttttttttgttatttttaggtggatttagatttaaggtttagatttgtaaggtaggaaaatgttgtaggtttaggttgggaaagggtttaaagttgttagtggattgttgggatttagtttttttttttttattaagagagtgagttttattgggtttaaaatgattttaagttttggtttttgatattaggggaaagagatgggggtgatagaattatagaatttttgttatgtttttttaagtgtgtttagagatgtgtgtgtgtgtgtgtgtgtatatataaatgtttgtttatttttaggtaggaagggtggatgtagttatttatatatggtttgtttttttggaggataattttatttgataaataattgtttttatttgaatagaataaataaggttttatgatgaagtaaaatattaaatatatatgtattaaaaaatgtataattatttttttggaatgggttatatagagatgtgttttttaaaatgttaagagtgtaaaaggataaatagtgaaaaataaattttttttttattttgttttttagttttttaatttttttatttagaggtgagaatagaatttttatattttttagaatttttatagttagaattgtttatatgtttttattgtttttatttttatttttgtttgtataaataaatgaattgtttattatggaaattttttaaaagatttgttaatattttaataggaagtattaatagtttatgttttaggattttgtttttataattttgtaatattatattatgatatttaatttaatttttattaagttttgttaaaaatggattttaaattaagttgtaaatttttagtaatttggttttgtttttttttttttgatagtattattaaataaatttttttattgttgaaagtaataagtttggttttgttttatttattggttgtgttggtgatatttggggattgttattgaatagatgtatagagggagtttttataggtaggggtttttttgtttgtgtttttgggagagtatgttttgtatatttgttgtgttgatgaagattttatagttttattagttgtgggtaagggggtttgaggtagttttaggtaagttggggtttagtggggagaagttgtagaagaattgattagaggattttaggaggttttagagttgggtgaggtagagagttttttgtgtgtttttttttttttttgtaatttggggattttttgtattggggtaggtttttggttaggtgtatgggaggaagtatggagaatttataagttttttgattttttagtttagatgttgttgggttttttttgttggagattgtgttttttttaaatttttgtgagtgttgtggaagtatgtggggtttgggttgttgagtgttgtaagataggggagggagttgggtgggagagggaggggtggtgttggggtgggttttgatatagagtaggtgttgtgggttgtagtatagtgtggagattgtagttttggagtttgggttagggtttatttgtttttgtagtgttggtttgtgtttttttgttgtagttattggtgagtgttgtggttttgagatttttgggttggatgtgtggtggttttagtttttgagtgtttgttttttttgttttgggttgtttgggttttttgggttttttggtggttgtatggagttaaggtgttttgttttgggtgttttttgtgggtgttgatttaggttgtttggagtttggagtttagagaggagagagatagttggggagtttggttattgtgggtattttttttgtgttgtagttgtttgtttggtttgtttttttgtttttttgttttttgttttgattttttttttttttgtagagttgttgtttagtgttttgattttgttattatgagagttttgttggtgtgtttgtttttttgtgttttggttgtgagtgattttaaagtgagtgtgtttttgttttgattgatgttgtttaaggatttttgattagtattaggggagaggaggggttgtttagggagttggggttttttggattttatttatagtagggttagattttttttaggaaatgggatagggtggtagtggaggtttgagaattatgggggttggtattggttggtaagggaggaagaggttgttgggattgttttagtttgtgggtatttggtagatgaagtttgtttgggttaatttattttttttggttggaaatttatggttttttatttgagaattagatatgaatagggtgaggtgagagggagagggaagagtgggttttgggattggggttagtttatttttattttggagtttttggagtatgggatttttgatgaagtttttttttgaattttttttagggtagtaatgaattttattaagttttatgtgagtatttatttttataatagttggttgtatagataagttgggaaggttttaggggatattttttttttgttttttgttgtagggttgtgttattttttattatttttatttttttttgtttattttatttttgttttttttagtgaattgtgattgtttaaatggaggaatatgtgtgtttaataagtatttttttaatatttattggtgtaattgtttaaagaaatttggagggtagtattgtgaaataggtatggggatttttattgtaattgggagagaaatttggggatagggagggatgggtgggaggtaagagtaggtaggagttaggagttggaggtagggtgggtgatatttttatttttatgtgataagtataaatatatatatatgtttatgaaatagtggttatataaatgtgaggtggggttggaaggagattttgtttagttttttggtaggtttgaaatgatatttttaaaatgtttgttggtagttgggtatggtggtttatgtttgtaattttagtattttgagaggttaaggtgagtggattatttgaggttaggagtttaagattagtttggataatatggtgtaattttgtttttattaaaaatgtaaaaattagtttggtatggtagtggatgtttgtagttttagttatttgggaggttgaggtaggagaattgtttgaatttgggaggtagagattttagtgagttgagattatattattgtattttaattgggtgatagagtaagattttattttaaaaaaaaaaaataaaagttagttggaatgttttttttttttttatatttttttatttttttgtttttttgtagataagttaaaaatttgttatgaggggaatggttatttttattgaggaaaggttagtattgatattatgggttggttttgtttgttttggaattttgttattgttttttagtaaatgtattatgtttatagatttgatgttttttagttgggtttggggaaatataattattgtaggtgaggtgggggtaataaggattaaaagttttttttatagttttttagaaattttgttattattttttttttttagagggttggttatagtataagagaagtgtggtttttggttgagttttttttgaggggaggaggtagggaaggttttttgggttggaatgatattttttatttttttgtgttgttaggaatttagataattggaggtgattttggtgttatgtgtaggtgggtttaaagttgtttgtttaagagtgtatggtgtatgattgtgtagatggtgagtattattgatttgttgatgatagtggggtggaaggggataaatttatatgtttttttattttattataggaggattgaggaggtggggggtgtttgagagggatgtttttttttatttgtttttttaagatatttttttgtttgttttttaggaaaaaagttttttttttttttagaagaattaaaattttagtgtggttaaaagattttgaggttttgttttaagattattgggggagaatttattattattgagaattagttttggtttgtggttatttataggaggtattgggggggttttgttatttatgtgtgtggaggtagttttattagtttttgttgggtgattagtgttatatattgttttatgtatggttttgggttttttttttttgatttttttgttttattttaagtatattttttttttttttttagtaaagtgttttgttttattttttttttatttgtt

SEQ ID NO: 99 - DNA, 4453 bp, Artificial Sequence
  chemically treated genomic DNA (Homo sapiens)
ggtagatgagggagaaatgaggtggaatattttgttgggaaggagaaagggatgtgtttggggtggggtagaagagttgaagaggagaaatttagggttgtatatgaagtagtgtgtggtgttgattatttagtaagggttgatgaggttgtttttatatatgtaggtgatagagtttttttggtgttttttgtagatggttgtaaattagggttggtttttgatggtggtgaatttttttttaataattttaaagtggggttttagagttttttggttatattgaaattttaatttttttggaggagaggagggttttttttttggaggataaatagagggatgttttagggaggtaggtaggagaaagtattttttttgggtattttttatttttttagtttttttgtgatggaataaggggatatgtaagtttgtttttttttattttattgttattagtaggttagtgatgtttattatttgtgtagttatgtattatgtatttttggataagtagttttaggtttatttgtatatagtattagggttgtttttggttgtttgggtttttggtaatatagaaagataggggatgttattttaatttagagggttttttttgttttttttttttagggaagatttaattagaggttgtattttttttgtgttatggttagttttttgggagaaggggatggtaataaggtttttgggaagttgtagggagggtttttggtttttgttgtttttattttatttgtagtaattatgtttttttaggtttagttgaagagtattagatttgtgggtatggtatgtttgttgaaggatagtggtagagttttagggtaggtagggttggtttatggtgttagtgttggtttttttttggtaaaagtgattattttttttatagtaggtttttgatttatttataaggggataggaggatgagagaatatgagaaagagaagaatattttaattaatttttattttttttttttgagatggagttttgttttgttgtttagttggagtgtagtggtgtgattttagtttattgagatttttgttttttaggtttaagtaatttttttgttttagttttttaagtagttgggattataggtatttattattatgttaggttgatttttgtatttttagtagaggtagggttatattatgttgtttaggttggttttgaatttttgattttaaatgatttatttattttgattttttaaaatgttgggattataagtgtgagttattatgtttggttgttaatggatattttaaagatgttgttttagatttgttagaagattggatagggtttttttttaattttattttatatttgtgtggttattgttttgtgagtgtgtgtgtgtgtttatgtttgttatatagggatgaagatgttatttattttatttttagtttttaatttttgtttgtttttgttttttatttatttttttttgtttttaaattttttttttagttgtagtggagatttttatatttattttatagtgttgttttttgaatttttttgggtagttgtattagtgaatgttggagaagtatttgttggatatatatgtttttttatttagatagttatagtttgttggagagaataaaggtggggtaagtgagggggagtggaagtggtaaggggtggtgtagttttgtagtagagggtagggaggggatgttttttgaagtttttttaatttgtttgtgtagttaattgttgtaggggtggatatttatatggaatttgatgaagtttattgttgttttggaagagatttgggaggaggttttattaaaggttttatgttttagggattttagggtgagggtaaattggttttaattttaaaatttattttttttttttttttttgttttattttgtttgtatttagtttttaaatggaagattatgggtttttagttaggagaaatggattgatttaagtaagttttatttattagatgtttgtaggttggggtagttttggtggttttttttttttttgttagttagtgttaatttttgtggtttttaagtttttgttgttattttgttttattttttggggagagtttggttttgttgtggatggaatttggaggattttagttttttgagtagtttttttttttttttggtgttgattagaggtttttgggtagtattagttaaagtaagagtgtatttattttggagttgtttatgattaggatgtagagaagtaggtgtgttagtagggtttttatggtggtgaggttggggtgttagatggtggttttgtaaaggaaggagaagttagggtaagaggtggaggaatgggaaggtaggttaggtgggtgattgtagtgtaggggagatgtttgtggtgattaggttttttagttgttttttttttttttgggttttggattttgggtagtttggattggtatttgtgggggatgtttgggatggggtgttttgattttgtgtagttgttggggagtttagggagtttgggtagtttagggtgggggaggtagatgtttgggagttggggttgttgtgtatttggtttggggattttaggattgtggtatttattggtggttgtggtaggagggtgtgagttggtgttgtggggataggtggattttggtttgggttttggggttgtggtttttgtattgtgttgtgatttgtggtgtttgttttatattagggtttgttttggtgttgttttttttttttttgtttggtttttttttttgttttgtagtgtttagtgatttggattttgtgtgtttttgtaatgtttataaagatttgggggaagtgtgatttttagtggaggggatttaatagtgtttggattgaggaattgagaggtttgtaaattttttgtgtttttttttatgtatttggttgggggtttgttttagtgtaaggagtttttgaattgtagagaggagagaaggtgtataggagattttttattttgtttagttttgaagttttttggggttttttaattagtttttttgtaatttttttttgttgggttttaatttgtttaagattgttttagatttttttgtttgtagttgatggagttgtgaagtttttattaatgtgataaatgtatgagatatatttttttagaagtatagatagaaaaatttttgtttgtaggggttttttttgtgtgtttgtttagtggtagtttttagatattattaatataattagtggatggaataaagttgggtttattgtttttggtagtaagggggtttgtttgatggtgttattagagggggaaaggtaaggttagattattgaaaatttgtagtttggtttaaagtttgtttttgatagggtttgataaggattgggttaggtgttgtgatatgatgttataggattgtgggaataaagttttagggtataaattgttggtgttttttattgaagtgttaatgggttttttgggaagtttttataatgagtaatttatttatttgtgtaggtaagaataaaagtaaagataatggaaatatgtagatagttttaattgtggaggttttggagggtgtggaagttttgtttttatttttgagtagaggaattgggagattggaggataaaataagaggaagatttattttttattgtttgtttttttatatttttaatattttaaaaagtatatttttgtatagtttattttaaaaagataattatgtattttttaatgtatgtgtatttagtgttttattttattatagagttttgtttattttatttagatagaaataattgtttattaaataaaattgttttttagaaaaatagattatgtgtaaatgattgtatttattttttttgtttgaggataagtagatatttgtgtatatatatatatatatatatgtatttttgggtatatttggaggaatatagtagggattttgtgattttgttatttttattttttttttttagtgttaggaattagggtttggggttattttgaatttagtaggatttgtttttttagtgggaaggaggaggttgagttttagtaatttattagtggttttgggtttttttttagtttaggtttgtagtatttttttgttttgtaaatttggattttgggtttgggtttatttgagagtgatagaaggaaggtagggagagtgttaggaaggtaggaaggaggaaggtttttttgttttgttttagttgagggtttagggtgttagttgtttgttggggaaagtataagttagttttttagtttttgggaggtaggtgatttattgttttttggagagatttttgtgtttgttgagttgttagttttttaggggatagattgagttagtgatgttataggttttagagttaa

SEQ ID NO: 100 - DNA, 10490 bp, Artificial Sequence
  chemically treated genomic DNA (Homo sapiens)
agaaggtgtttgttttttttttgttttttgttatgattgtaagttttttgaattgggagttgattaaattttttttttttataaattatttaggtttaagtatttttttatagtagtgtgaaaataaattaatattttttttttgaggtgttttttttttaggtaatttgttgtttttatgttttttttttgttttttgtttttttttttttttttatgaggtttaagtgataaatggggttagttttagttttagttttagttttagttttattttattgtaggtttgtgtggttgttggagaggttgtgttttttttttttttttgagtttgtttgatatgttttttggattttggaggaaattgattttttatttttatattggtgtaatattttttaagattttaaagttgtattatttgagttagtttttttttttatttttatttgttagggttgttattgggatagttttagagggtggtgttaatggatgaatggatggatggatagtagtttagggatgatgtttttgtttgttttgaattgggttttttttttaatgagaagtttttttgagtgagtatatatagttattttttggtatttatggaggattagttttagggtttttgggaatgttaaaatttatggatgtttaagtttttgatataatgtggtttagtatttatgtataagttatgtatatttttttgtatatgttagattgttattagattatttatgatgtgtaatataatgtagatgttatataaatggttgtgatattgtattttttagggaatgatgataagaataaagtttgtatatgtttaatagaaatataattgtttaatttattttttgaatattttttatttgttgttgttgaatttatagatgtagagtttttggatatgagagttaagtgtgttttgagagtagggtgggtgaggttgttaatgagtataggggagtaggtgttgattaggaggattttgtattggggtatttggatgttttgttttaggatttgagattttagttggatggtataggtagatttagtttaggttaaagttgtttttttgaagtttttttttattttaagttttttttggattttggaatttggtattttttaggttttgtgtggaaggatagatgaattaggttttagataatatgtttagaagagtgagtttttattgtgtgtttggtattttttttataggattttttagttagaatatttaagggttatggagagaaatatttagttaaaatattagaaaagaaaaagtgatattattagagatattaaaaagattattaggtaatagtattagtttttgtattttgagatttaatagtagtagttatttttttttattgttatgtgtattttaggattattttgggtggggagggttgtggttagggagtagttatggatgttttgatgttggttttgggttttgggggtgatagtgatgaggaattgggtgtatatatgagtggggtagttgggtttggttagagaagtagtatatatgtgtatagatgtgtttatttatatatatatgtgtatgtatgtgtataaatatattgtaggtaggtatgttgatgttttaggtagtggaggattttgattttgggtgttgttgatttgggtaaggttttattgtgatttgtgttatgattttagaatgttattggtgtttagtatttgtttgttttttggtttgttttagtggtttatagtagttatatataggtagtggtatttgtgagtagttttgtggatttaaaggttttttttttgagaggtatgatttaggttagttgatttattagaattaggtgagtgtgatttgtttttttttttttaggtggatttggggatagtggttatggtgtgggtggtgttggtttttgtggggtagttattgaggagggttatttttgagtatttattaggtgtttgttttatattgtttgtgtagatgattggtttttttgtttttatggtggttttgtagagtgggtgttgtttttaaatgtttttatttgatagatgagatgtttggggttagagaggtagtaattggtttgggaatttggatatgattttgagttttgtttttagttttgttgtgtgttgtgttggaatttaggtttgaattttgtgatttttttgttttagattttaaatttgtttaggttttttattttgatggggtagagtttggttttggtagagttattggtatagagttattggtatagatttattgatggtttttagaatatttttgtgttttaagttgggttttgatggttgttgtgggttttattgaatatatatggttttttgtttaggggagtttgttgtttttgggtagttgtggaaaatgaaggagttttggagggttggttgaggggagattatttttttttgtgtttaaaggggtttgggtattagggttttttttaggtattttttgttttgtgtggtttttttgaggttttgttttttttttgttttgagtatttttaggagggatggtttatttagttgttttttaggattaaggatttattgtttttttttagtgatttaggaaaatgaagtttttttttgttgggatggtttagaatggtggattttatagtttttttgtgagagatgtggtttttatgtgtataatagattttttttattttttaaatttaatatttttttgtttaataggtgttatttttaaagtggttttattgtttagattgaagagttatggtagttaaagtgatgagtggagtagaattgagtagttgggagagattttgttttttgtaggaaattgggtattgttgaggttttgagtattttaggaggttgattgtatagagatttttggttgttgattttagtttgtttttatatttttggaatagtttattatgggttttttatttttggtaggtggaaattatttaatttgttggggttggtgtgtttttattttatggtattgggggataataggattttttgtttaggttttattgtatttaagtttttgggaagatgtttatttttgtttgggatttgagattttagagattggagtagttgtgggttattgggtttggtttttttttttttgggggtggtggtggaatgggggttatgtagttagttagtatttgggagtttggtgagagtggtttaggtgttttttgaagttgttgtgtatagtgtgatttttagataattttgttttataggatggatgtggtagaggttgtgggtagttggtgggtataagagtgagaggatattattatgaaatatgaaaaggtataagttggtttgttttttggagggaggttttttttagtgtgttttggttaaagggttttgggttttttaggagtatagggtagggatgggtggttaatgtttttaggtttttgtattttttattttggattttttattaaggttttttttgggttatagggatattgagttgggttgttagaggataaggggtttaagtttttttgaagttataataataatgttgattatttggggattgtatagtgagttttttgtattttttttatttttaaagtatttgttttagtttagggatgggtttgtttttagaaaggtttttttgatgtaggatatgttttattaggttgggttaattttttttttagggatagaatttttttttgatttttttgtaggtttagtttgaggttgttaggttagaggtgtggggtttatttagggagttggtgggaatggagattgggttaggttaggtttttgggtgtttagtagttttgttggtaagtgagtataagaggagtggggtagtttgagggtttggttttgtttatttggagataattttggtgagatgtaagggttatggttatagggtgaggggatgtttggtttagttttagggttgttgtttagtaggtttttgagggtttatttgtttttgtttttttttatttttttagagttatagtttttattgttttgtgaggggaaaaggtatggtgataatgggggttgtagttttaggagaatgggggagaagatgggtagggttttgttttgggtattttatggtgaggttagggaggtagtagggtttgtggttaaagatttgggtttggtgttgggaagggatttggggttgggtaagaggagtttagttaggagtttattttttagggattataggatggagagatagaggatttttggggaggtagggtgggagggagttgatgagttgtgttatttttgaaatgtagggtgtgtggtttgggtgtagggagaggtaggtggatgttgggaggttagaatttgtaagggttttggggttgttaagtggggtgggtttttggtgtagttagagtatattgggtaggttttagggtaggtttttttgattttggtggggggatgtggttattttttgagggatttttgttagggtttggttgtttattttgggtggtttttattttattttagggttaattttttttagttttagtagaaagtattattttgagtttaggatgggtagttttattgggtagtttgattgttttttatgttaggggttttagtaattttggttaggttgtttttatattttttttttttttaggttttgttttttttgggagttagttttataggaaggtttttgtttttttttttttgtgtttttttttgggttgagttttgagttggaaagggatagagttagttttttttgggggttggtatttaggttggggttgttttaggttttgtgtagttttttagttttgtttgggttgttttatagtgagatggagttgttttttttgattgtgtgggaggtgaaggtaagagtttgatgtgtggaggggttggtttagggatgtagggattgggtgggtggttagtgaggtagaggaagtagttggtttgagtggtggtgggtgagggtaatatgttgttattgggaggggtagtagtttttgttggatttgattttaggttgttgtttattttggtagtttgataaaattttaaaaggagaattatagttttggtttgggggtggttgtgtgtttgtgttaggattttatttagaggttgggatttaagattggtgtgtttgtggtttgaggatggtatattttggggttttaaagttagtttattggtgtttatttgtttaaaggtttttagtttttgaggtttgtttttttttggttttttttagttggtttttattagggttttagagtttaagatttagtatttgtgggtggttttgggaagtttggtagttttgttaattttaatatgttttatttgatagtaaatttggtgggagattagttgaaagagtaagtgggtggatatgttgggagattgggagaaatataaaagtagtagaaaggtaatgtgtggagggaggaagtattttttgtagagataggggataggtatttatggttgtggtttggtattattagttttttagagggtgggtggtatattgtttttgtttagaggattgtaggtttggttgttagattttttgtttatttgtgtaagtgttattttgtagggagggaatttgaatttagggttgggattatttggagtttaaggttagggatgttttggtgatttgaaggaaggaaaaggtttagattagagttttgattttgagtgtttatttatttttttagttttgggaagggagattttgttttagtttgattttatttttattgaggaattatggggttaaaattgataatttttagaatttttgggttttggtttttattggggttattttgtggtttgtgatattagattgttttttgtttatagtttatagattgagtgtataagggaatgtttatgaatatttggggtttgatgtggttagtttttttgaatattgaggaaatgaagttgaaaaattttggaagatattaggtatgtttagttagagtataataaataggataggttgtgttggggtttaggtttttagttggagggaatgttaagattattttggggagttgggggtgaaggttagatgaatattttgggtatagatggtgatatagttattatagataaatttagttttggtgattttttttggttttagtaataagttaaaatgtagttttttgtagaaggaaattttttttttgttttttttttttgaagtgttgattgtgggttgattgttattgggggtagggagttttttatttgttttgagattgttttttttttttggttttgttttatagattatgaaggagaagggtaagaggttatttgagtatatttagtgtattgattgggatgtaagtgggatattaaggaagtatatattttttagggattgatatggaattaagtaagtttatgggagttatagggttttagtagagatggggtgaatgagagggatgggggtttttttggagtagaagttagggttatttaggagggatgatatagttgttaagagtttttttggtttagggagtagttggtattatgaattgagtatttttttggttttaagttttgggttagattggaatatgtggggttagaatttaggaggattttgaggagatggaaggtagtaaataaaattatgtataatggtgaagggtgttttttttgatttatggggatttatggtaggatttatgggagggtggtaggatagagggtttatgagttttttttaggtaatagtgatagtattaaatgttgggagaattaggggttttggaaatttttatttaggtttgttgggaatatgatatggtatagttatgttggtagtttgttgggtagtggtttataaagtttgatggatttgaattatatatttttaaagtgttatagatattgaatttattgatttgtaaattgatatttatatgaaattagtatgttaggtttattgtttgattttttgttatttatatatggagtttttggggatggtttttaatatggggatggggagagtaaggttggttttttttttaaatggaagatttagtgagaaaagggaatgagttggtgatgtttgtatgaatgtgggtggattttagatgtattttgttgagggatagaagttagatttaataagttattatagtaggatttttatttttaggttattttggaaaaggttaaattatagggattgagaagtagtttgggtggttaggggttgatggattggggagaggttgggtgtataggggttattttggagatttggaggatgaaggagttgttttaggaggggttggagtggtggttgggagattttgtatattggtttggaattgtggaggaattgtatatttatagattgaattggtgtgtgtgtaaattgaaaaaaaaaaaaaaaaattatttagagtgaaaaggattaggtaagttattgtataattgggttatttgtatgttatagatgtggattttattgaaatatttttttaagagttttaggttttgaagagtttattgtttatttggtgaaatatttgaatttgaaatgggatttgttgttaggttttgtagataaagtgaaattaataatatttgtataaaataaattaaagttttttttttttgttttttaggtagtgggaattattttatatttttttggtatatgaggagtataatttggtgagtatttttggtagtgaggtttttgggttatatttttatattgataggagtgggtgtttggtgggggtgttgttgttttttttaaagttagtatttgtgatttattaggatataggaggtaggatgttagtttattgttggtataaatttttaaggaagggggtggttttaaggggttaagttgagatatagaggagttagggtttggatttttggtgttatttgggtttgattattattttttagaataagaaatgatgttttttttttggggttgttttaaagtttaggagtttggtagtattgtatataggatggtgttattagtagatattttggataaggtgttgaagtgtttgatggatttggtttttgttatgaaatgaatgtgtattttgaggaagttttttttttagaggaagttttttttttagaggaagtttttttagttatttttgttttttttaatgatatgagtttttttaggtgattttagtttttttaggtgatgtttttttatggtgattttggtttttgtaggaggtgggttattgtagggatttgagttatattgttgttttgttttttttttatttttttgaggaggatgtattttgggtattggtgtagttgttggttagtgagaggtattttttgtagggtaagtgaatagttgttttggggattttttgtagttagatttggggatggttattttggttaggtgattatagtttttagttaaggtattttttttgtgttgttagtttgttgggagattttaggatgtttttgttgagggttttataggagtttatggttgatttttaaagtttaaattagatgttttttatttttattagtagagggtattttattttttttgtggttattttttgtgttttggagttatgttttttggttttgattttgtgtagttgatttttttttttttgagagtttttttgttttttagttgtttgggtttttgttgttattggtgtttatgaatgggttgattaagtttaggtggtagtatttttttattttttgttttttggtttgattttattattaggagatgattgggaagtttagtgtttatttagttttggttattttgttgtggtttgaaagttaggtttgttttttttgtattttggtttaggaggtttttaggggaatttttagttaggttttagggaatgtttttgttttatttttttagggtaaaggttgtatgttggggttattagatgggagggtgggaggttttggggtttgggggtttttttagttgtttagtttttgtagttgatggttttatattttgggggaaggttttgattttatgatgggttgggggttttttaggattttatagtttaaatggtgggattgtttaggggttttaagattaataggagtatgtggtagttatgttataatttaagattatggggtattaggtgagtttatggtttttttagttttttttagaggttttgttttttgtggggttgtaggagtaggggggttggagttttttgtggggttggtgattggttgagttttagttagggtttgatttgggatgttgggttttttatgggttgggagttggtttttttttttgttttggaggagatagaggtatagggatgggggtttagtttttgtagagtagggtaaagggtagtgtgtttattgggagtgtgggaaggtgatagtgttgtggggagttttggatattgtttagtgttttgtattaggggaagggtttttagaggttttggaagagggaggtttttagggtagtttagtggtttgagtatttttgttgtttttattaggataagaaagatttatgtgggtagtgttttttgttaggttgttttatttggatattgattgatggggtaaggaggtatagggagattttggtttagggattttttttgttttgtagtgttttgtttttttagtttgggggtttggtttatttttagtttataggaggtttaggtgggtttttaaaggatatataagtaaaattttttgtttaaggggggttattttagggttatggttggggtttaggtttagttttatgggtagattgggttaggatttgatttgagagggtttagggaagttttaagttttgggtaagtttttttttttaggagttatatttttatttaaatgagtgttttttatgaggagttttaagattttgtttgatttagtgttttggagggtttaggtgatttttatggggaaggttattgattttggagattgaagttttagtgtgtgtagtttgagttattagttttagtttggaaggattaggtttttttatatttgttgtttttatagattttttttgggtttattttgtgtttgtgggatgtgtatttggtagaaggtgaataggtgttgatgttgataataagaattgtttttaaggtttagtagagtaagtttatgtgtgtttagtggggtttggggagttttggggttagattttgattggtttgagggtagtttttttatattgtttttatgattttttgttttggtttagagggaggtttggttaggtgggttgggtaggatattgtgatattgagtttattttttatatgatttagatgaaagttgagagtgtggtgagtatttttttgttt

SEQ ID NO: 101 - DNA, 10490 bp, Artificial Sequence
  chemically treated genomic DNA (Homo sapiens)
ggatagggaagtgtttattatatttttgatttttatttgggttatgtgggggatgggtttggtgttatagtgttttgtttagtttatttggttagatttttttttgggttagaatagaggattatgaggatagtgtgaggaagttgtttttgggttagttggggtttgattttagggttttttaggttttgttgggtatatgtagatttattttgttgaattttaaaggtgatttttgttattggtattaatgtttgtttgttttttattagatatatgttttataggtgtagggtgagtttgagagagatttgtggggatagtaggtgtgaaagaatttggtttttttaggttggggttggtggtttgagttgtgtatattggggttttagtttttagagttagtgattttttttatgagggttgtttgagttttttaggatgttgggttagataaggttttgaagttttttatggggggtatttatttgagtggggatgtggtttttggagagaggggtttgtttagggtttgaggtttttttgagtttttttaagttgggttttggtttagtttgtttatgaggttgggtttgagttttagttatggttttgggatgattttttttgggtagagggttttgtttgtgtgttttttggggatttgtttgagttttttgtgggttgggagtgagttagatttttgggttggggaagtagggtattgtagggtaaggaaggtttttgagttagggtttttttatgtttttttattttgttaattaatatttggatgaggtagtttaatggggaatattgtttatatagattttttttgttttgatggaagtaatagaggtgtttaggttattgggttgttttaaaaattttttttttttagggtttttgaagattttttttttagtgtagaatattgggtggtgtttagagttttttataatattgttatttttttatatttttggtggatatattgttttttgttttgttttgtgggagttgggtttttatttttgtgtttttgttttttttagggtaggaaaggaaattaatttttagtttatggagaatttgatgttttaggttaggttttggttgggatttagttagttattagttttatgaggggttttagtttttttgtttttatagttttatgggaggtagggtttttgggaagagttgaggggattataaatttatttgatgttttatggttttgggttgtgatgtggttattatatgtttttgttggttttggagtttttggatggttttgttatttgggttgtgaaattttgagaagtttttagtttattatgaaattagagtttttttttaagatgtggagttattagttgtaagagttgggtagttggagaggtttttaaattttaaggttttttatttttttatttggtgattttaatatgtggtttttattttggggaggtggggtgggaatattttttggagtttggttggaggtttttttggaggttttttgggttagggtgtaaaaagggtaagtttgatttttaggttatgatagggtggttggaattgggtgggtgttgggttttttggttattttttggtagtggggttgggttagggaataggggatggggagatgttgttatttgggtttggttggtttatttgtgggtattgatggtagtaggagtttgggtagttggagggtaggaggatttttagggaggggagagttagttgtatagaattagagttggagggtgtggttttaggatatagagggtggttatggggaggatgagatgttttttgttgatggggatgagaggtgtttgatttgggttttgggggttagttgtggatttttgtgggatttttagtagagatattttaaagttttttaataagttggtgatataaggagggtgttttggttgaaagttgtgattatttggttagggtggttatttttaggtttggttgtaggaggtttttggggtagttgtttatttattttgtagggagtgttttttattggttagtagttgtattagtgtttagaatgtattttttttaggaagatagaggaggaataaggtggtgatgtggtttaggtttttgtagtagtttattttttgtaagagttagagttattatggaaggatattatttgggagggttgaggttatttgggaggatttatgttattggagagggtagaggtgattggagaggttttttttgaaggagaggttttttttgaaaaagaggtttttttaggatgtatatttattttatgataagagttaagtttattaggtattttagtattttgtttaaaatgtttgttgatagtattattttgtgtgtgatgttgttaagtttttgggttttggggtagttttaggaggagggtgttattttttgttttgagaagtggtggttaggtttaggtgatattaggagtttaggttttgatttttttgtgttttagtttgattttttgagattatttttttttttggaggtttatgttagtggtgagttgatattttattttttatattttggtgggttataaatattaattttaaaagaagtaatgatatttttattagatatttatttttgttaatatggaaatatggtttgggaattttattgttgggaatatttattgggttgtattttttatatgttaggaggatgtggagtagtttttgttgtttaggaaatagagaaagggggttttggtttgttttgtgtagatgttgttaattttattttgtttataaagtttaatagtaaattttattttaggtttagatgttttattagataagtagtgagttttttagggtttgagatttttgaagaaatgttttagtaaaatttatatttgtgatatgtaaatagtttagttgtatagtgatttgtttgattttttttattttgaatgattttttttttttttttttagtttgtatatatgttagtttagtttgtgggtgtatagtttttttatggttttaaattaatgtgtagagttttttggttattgttttagttttttttggggtgatttttttattttttaagtttttagggtggtttttatgtatttagtttttttttgatttgttagtttttggttatttagattgttttttagtttttgtggtttggttttttttagaatggtttaggaatgggaattttattgtggtagtttattgggtttggtttttgttttttagtaaaatgtatttaggatttatttatgtttgtgtgggtattattggtttgttttttttttttattgggttttttgtttgaagggaggattagttttgttttttttatttttgtgttgaaggttgtttttgaaggttttgtgtgtgagtgatgaggagttaagtagtgaatttggtatgttggttttatgtggatgttagtttgtaaattagtgggtttaatatttgtgatattttggggatgtgtggtttaagtttattgagttttgtgagttattgtttaatgggttgttaatgtggttgtgttatgttatgtttttagtggatttggatgagagtttttaggatttttaatttttttagtatttggtgttgttattgttgtttggggggggtttatgggttttttattttgttatttttttgtgggttttattatgggtttttatgggttagggagagtattttttattattgtgtatgattttgtttgttgttttttatttttttaggatttttttgggttttggttttatatgttttagtttggtttagggtttggaattagggaggtgtttggtttatggtgttggttgttttttgggttgggagagtttttggtagttgtgttattttttttgggtgattttggtttttgttttggggaagtttttattttttttatttattttatttttgttgggattttgtggtttttgtaggtttatttggttttgtattgatttttgaagaatatatgtttttttaatgttttgtttatgttttggttgatgtgttggatgtgtttagatgattttttgttttttttttttatgatttgtagggtagggttaagaggaggaagtagttttagaatagatggaagattttttgtttttagtggtagttagtttatagttagtattttgggaaggaaggatagaaggaaggtttttttttgtagaaagttgtattttggtttgttattgaagttagggagggttattagagttgagtttgtttgtggtgattgtgttattatttgtgtttagggtgtttatttgatttttatttttagttttttagggtggttttgatgttttttttagttggagatttgggttttgatatggtttgttttgtttgttgtgttttggttgagtgtatttggtattttttggggttttttaattttatttttttaatgtttaggaggattgattatattgggttttggatgtttatgggtatttttttgtatgtttgatttatgagttgtgggtagaaaatgatttggtgttataggttatggggtgattttagtgaggattagagtttggggattttggaaattgttggttttggttttatgattttttagtagaggtgagattaagttgggatagggtttttttttttaggattgaaagagtggatggatatttagagttgaaattttgatttgaatttttttttttttttaggttattagggtatttttagttttgagttttgggtagttttagttttagatttagattttttttttgtaaggtgatgtttgtatgaataggtaggaaatttggtgattaggtttgtagttttttgggtgaggatagtgtgttgtttattttttgagaggttgatggtgttaggttatagttatgggtgtttgttttttgtttttgtagagagtgttttttttttttatatgttatttttttgttgtttttgtattttttttagttttttagtatatttatttatttgtttttttggttgattttttgttgaatttgttgttaaatgaggtatgttggagttagtggagttgttaggttttttagagttgtttgtggatgttgggttttgggttttggagttttggtgggagttagttggaaggagttagggaagggtagattttaagggttgagagtttttgagtaaatgagtattagtgggttggttttgggattttgggatgtattatttttaggttatagatatattagttttaggttttagtttttaggtggggttttgatataagtgtgtagttatttttaagttaggattgtggttttttttttggaattttattaaattgttaaagtgaatagtaatttggggttaggtttagtagggattgttgttttttttagtgatagtgtgttgtttttatttgttattgtttaggttagttgttttttttgttttattgattatttgtttagtttttatgtttttggattagtttttttatgtattaggtttttatttttgttttttgtgtagttagaggaggtagttttgttttattgtaaggtaatttaggtagagttgaggaattgtatggggtttggagtggttttagtttgggtgttgatttttagaaaggattggttttgtttttttttagtttagggtttagtttaggagaaggtatagggaagggaggataagggtttttttgtggggttgatttttaggaggggtaggatttgggagaagaaggagtgtagggatagtttggttggggttattggggtttttggtgtggggggtggttaggttgtttagtggggttgtttgttttggatttgaggtggtgttttttgttggagttgagaaaggttagttttgagatgggatgggggttgtttagggtgggtgattgggttttgataggagttttttagggagtgattatatttttttgttagggttaagggagtttgttttgagatttgtttggtgtattttggttgtattaggggtttattttatttgatagttttaaggtttttgtaggttttgattttttagtatttatttgtttttttttgtatttgagttatatattttgtgttttagaagtggtatggtttgttagtttttttttgttttatttttttagggattttttgtttttttattttgtgatttttgagggatgggtttttggttgggttttttttatttggttttagatttttttttagtattagatttaggtttttagttgtgagttttgttgtttttttggttttattgtgagatgtttagaatggggttttgtttatttttttttttgtttttttagggttatagtttttattgttattatgttttttttttttatgggatagtgagggttgtagttttaggggaatgggggagaataggggtaggtgggtttttagagatttgttggataatagttttgaggttgggttaggtgtttttttattttgtggttataatttttgtattttattggggttgtttttaagtagatagggttagatttttaggttgttttgttttttttgtgtttatttgttgatagaattgttgagtgtttaggggtttgatttagtttagtttttatttttattggttttttagatgggttttatatttttggtttaataattttgggttggatttgtaggggagttagggaggagttttgtttttggaaaggaggttgatttgatttggtgagatatgttttgtgttagaaaggtttttttaaaagtaaatttatttttgagttgagataggtgttttaggggtgaggggagtgtagaggatttattgtataatttttaaatgattgatgttgttgttgtagttttgaaaaggtttaggttttttgttttttggtagtttagtttggtgtttttgtagtttagagggagttttggtgaggggtttaaggtaaagggtgtaagggtttgggggtattggttatttgtttttgttttgtgtttttagggagtttaggattttttgattagggtatattggaagaggtttttttttaagaagtagattgatttgtatttttttgtattttataatgatgtttttttgtttttgtgtttattaattgtttgtgatttttattatgtttattttgtgagatagaattgtttaaaggttatattgtatgtggtggttttggagaatatttgaattgtttttgttgggtttttagatgttggttggttgtgtaatttttattttattgttgtttttagggaaaaaggggttagatttagtggtttatagttgttttagtttttggagttttaagttttaagtaggggtgggtatttttttaaggatttgagtatagtgggatttagatagagaattttgttgttttttaatgttatgaaatggggatatattggttttagtaggttgaatggtttttatttgttaagggtgaagggtttatgatgggttattttagggatgtggaggtagattggggttagtgattagaggtttttgtgtaattggttttttgggatgtttagggttttagtgatgtttagttttttatagggaataagattttttttgattgtttggttttattttgtttattattttggttattgtggttttttagtttgaatagtgaagttattttaggaataatgtttgttgagtaggagggtgttgggtttgggggatgagaaagatttattgtatgtatggaaattatgttttttgtggagggattgtggagtttattattttgagttgttttaataggaggaggttttatttttttgggttattgaggaagaatagtgggtttttggttttggagaatagttggatggattgttttttttgggaatatttgaggtaaaaggagggtgaggttttaagaggattatgtagagtaagaaatatttggggagaattttagtgtttggatttttttgaatataagggaagatagtttttttttagttagttttttagggtttttttattttttatagttgtttaagggtagtaggtttttttggataagggattatgtgtgtttagtggggtttatagtgattattaggatttagtttagggtatagaggtgttttgaggattgttagtggatttgtattagtggttttatattagtggttttgttaggattaggttttgttttattgggatgggaaatttgggtagatttgggatttagggtagggaggttatagggtttaggtttgaattttagtatagtatatggtagggttgagagtaaaatttagggttatgtttggatttttaggttggttattgtttttttgattttagatgttttatttgttgaatggggatatttgggaatagtatttattttatgaagttattatggagatgaaagagttaattgtttatatgggtagtgtagaatgggtgtttggtgagtgtttagggatgattttttttggtagttgttttatagaggttaatattgtttgtattgtagttattgtttttaagtttgtttggagggaagagagtaggttatgtttatttgattttgatgaattagttggtttgggttatgttttttagggagaaaatttttgagtttatagagttgtttatagatattattgtttgtgtgtaattgttgtagattattgaggtaggttagagagtagataggtgttaagtattagtgatattttgaggttatggtatgaattatagtggggttttgtttgggttagtagtgtttagagttagggttttttgttgtttgaggtgttaatatgtttgtttgtaatgtgtttgtgtatgtgtgtgtatatgtgtatgtgggtaaatatgtttgtgtatgtgtgtgttgtttttttggttaggtttggttgttttatttatgtgtgtatttagttttttattattgttatttttgaggtttagggttagtattagagtatttatggttgttttttaattgtagttttttttgtttagggtggttttgggatatatatagtggtggagggaagtgattgttgttattggattttagaatataaaagttaatattattatttaatggtttttttagtgtttttaatggtattatttttttttttttgatattttaattgggtatttttttttatgatttttggatattttagttagaggattttgtggggaaagtgttgggtatatagtaggggtttatttttttagatatgttatttaaaatttggtttatttgtttttttatgtagggtttaggggatgttgaattttagggtttagaaagagtttgggataaaaagaaattttaaggggatggttttgatttgggttgagtttatttgtgttatttaattggagttttaagttttgaggtaggatgtttagatgttttagtgtagggtttttttgattaatatttgtttttttgtatttattagtaattttatttattttatttttaaagtatatttggtttttgtatttaggagttttgtatttgtagatttagtaatagtagatggaaaatatttagaaaataaattggatggttatgtttttattgaatatgtgtagattttgtttttgttattattttttaaagaatatagtattatgattatttatgtagtatttgtattgtattatatattataaataatttagtaatggtttaatgtatatgggaggatgtgtatagtttatatgtaaatattaggttatgttatattagagatttgagtatttatggattttggtatttttggggattttagaattaattttttatggatattaagggatgattgtatatatttatttaggaaggttttttattggaggaaaggtttggtttaggatagatagggatattatttttggattattgtttatttatttatttatttattggtattattttttaggattgttttaatgatagttttagtaagtggagataagaaaaaagattggtttaaatggtatagttttgaggttttggaagatgttgtattagtatgagaatagggggttagttttttttaggatttagaaagtatattaggtaggtttggggagaggaaaggaatatggtttttttagtagttatataggtttgtagtaggatggggttggggttggggttgggattggggttggttttgtttattatttgggttttatgaggggaaaagaaagaatagggggtagaggaggagtatgggggtagtgggttgtttaaggagaaggtgttttagggaaggggtattagtttgtttttatattgttataaagaaatatttgagtttaggtaatttataaaggaaagaggtttaattgatttttagtttagggaatttatagttatggtagaaggtgaaggggaagtaggtatttttt

SEQ ID NO: 102 - DNA, 7001 bp, Artificial Sequence
  chemically treated genomic DNA (Homo sapiens)
atgatattagtaattgtttagtgaggtggatataaaatttttaggatatgagagggagatgtggtttttatattttgatgtgtaaatattatgtttagggaaaatgtaaggtgttttaggtttgtggattttgtatttttttaggtaatttatttatttattttttaattttaataaatgattattaaattttatttaatatataaatatttattgagtattatttgtgtgtatgagaagtgggagttagtatggtaaaagttaggtattgtgttaggtgagagagatttagaaattaaaattagagaagttattaataagagtttaaatatttgggtttaggtttatgtttgtaattttagtattttgggaggttgaaggaggtgaattatttgaggttaggagtttaagattagtttgattaaaatggtgaagttttatttttattaaaaatataaaaaattaggtgggtattgtggtatatgtttgtaattttagttatttgggaggttgaggtaggagaattatttgaatttaggaggtagaggttgtagtgagttaagattgtattattgtattttagtttgagtgatagagtaagattttattttaaaaaaaaaaaaaaaagagtttaaggatttgatggaggagaaaggtaagaatatgtgtgagataatgtaaggttattgttttagggtgtttagggtaattatgggggtagggtattttttggagaggttaatgataagtaggttgaataaagtaggggggttttttgtaggaggaggtttattaggtgaagatggagttgtatgggtaaaggttattttagagatttaggtgtgtttaggaggtggaaatttattgtaggtaaggtgagaggattgggtggggtggtttaggaggagttgatagagggtataagttgtgaaatagtttgaagtagggtagtgaggaaagggatttagaggaggaagatatgtggatagatggggttggttgggggttgttgtaggattttatgtaagaggttttaatattagagttttaggttttgagttttgtggaattaaaggttttagaaagtaatttattaggatttggtggttgatagtttgtagtagggggtgaaagaggagtttagagtattttttggtttttgtttttgttttggggtataggaggggaggaatttagtttggttatattggtttaggtgagggtgttttaggggaggttgagaggggttgtttttttgtttgttttgttattagggattgttttgagatgtttttggagaaagtgtttttggtttgttgggaaggatttgtgtttagtttttgttgtttagtagtttttatgggaattttgtttttttggggtttggatttattgtgatgtgaaggtgattattgtttatttttgggatattgtgggggttaagagaggttttgtggtgagggaggattattattttgggggttgggggggttttttttttagggaggaagatttttagttttggtgttttgtttttggtagattttgttttgtttatttgttttgtttttgttgtatgatggaaataaatggaaatggtttttatatatgaatgtattaaattgtaattataattttttagattttagttgtaataggattatggatttgagtgatttgtaaagatgttttgagttttgagttagagggtgtgtggggtggggaggggagtttgttatggtttttgtgattttatagtatagggggtagagttgggggttggggtgggggtaagggtgtaggtagatgggtttgggggtggttagtatggggatttatttagtttgttttgtatattgaggttatttttttttttgggttttaaagtttttttgttttttgttatgggtttgggggtttttttattgtagtttaatgttggttgtttttttatgttgtttaagtttattttttaggtttggtattttatagtagagattaagaggtggttggagggtagtgggggtatggatagtattattgggtgttttttttttaggtttttttggaaatttttgttttggaaatgtagaaagtttttttttttgtttttattttgaaattgtatttaataatggtaaataagttatttagttttttatagttggtaaagtgtaagttgtagatgttgttatatagtattttttgatagttttagggtagattgttgatttattttgtaggtaaaggagttgagatgtaaatattttttaaggaagtaagaatggtttttttttttattttttagaaggatttagggtaattgatttatttgataatattagggaatatgggttgttagttatgtatttatgagagaggtggttttgatttttagagtatggattttaggggagtttaggaatttgtaggagagggttttttagttggttattattgggatgggtatttgggtttgtgggagagggttttttaggtggttattattgggattggtatttgggtttatttggatgggttttgggagggtttgtttttgggggagatgttggtatgaatagttaaaagtattattttgagattttatgttaatattttttttttgaaatatgatatttgggaggattgtatagtttttttaatataggaaaatagttttgattgaaggtagttttttttttgttgtattttttgaaggtttttgggggttttgttattttgagttattttttatttgtttttgttgattttgtaaattggatatatttttaagggtttagaatagtatttggtataaaataggtgtttaaaaatatgtatgtaaaatagtggtttttggtggaggttgttagagttggttgtggttttatagagtaggaagaagtatgttttatttgtttgggttttggttagggtgttgagggttagtatggatattaggattagggtgtagattattttgttttttatggtggttattgttttttttttgttttaaaggtgattttgagttagggatgagaggttgtttgagttttggattttatagggtaggttttgtttgtttaaagagtgttagataatatttgtttaaggaggtttggggattttttgagataataatttttattgatttttattaaaggtgttttttagatatggttaagttatatggaaggatttgttgatagatagagatgatatgtggtgaggttattttggttgagggatttgagatttagaaagttttttttttttatgggagttttttttaatttgattttaatttaggttttatttatatttgagaggtttttttgttagggtaaatattgtatttattgtagaagtgatttatagtgagagatggttggaaaaaggtttggttgtgataatagtggtttatggggtggttattgtgattttgtagggggaagggaaggagtttatgaagtttattttgtttaggtttaagttaatttttttatagtggaattgttttaataatgaaattgtaggtttggtgtagtggtttatgtttgtaattttaatattttgggaggttaaagtaggtggattatttaaagttaggagtttgagattagtttggttaatatggtgaaattttgtttttataaaaaaaaaaaatataaaaattagttaggtatggtggtgggtgtttgtaattttagttattttggaggttaagttaggagaattatttgaatttgggaggtggaggttgtagtgagttgagattattttattgtattttagtttgagtgatagattaagtttttttttgggaggggttgggggtaggagggagaaaaaaatagtatatatgagttgttattaaaaattgataaagtgaatgtggtttatttttttgtgtttatggggtttttttttttttttttttatatttttttagttggttttttggatttttgtattttagaggatagttttttgtttttttgtattatgttttattttttttttttgtttggagtttttttttttatagtttttattattttttggtggataaaataagtgattgatatattatgttggttatttatttattgtatttttttttgtagtagatgggagggtgtatgggagtagaagtttttattttttagtgttttgaggtggttttagattttagaatagtggttttgattggtatttgagaaatagttgttgaagagttgtatgaagaaatggataataggagaaatttttttttttttagtgagaaattaggttttgaggaaaatgtatgttagtttaataaaggtattatttttttttgggtgatttagttagtatatttttgtagtttttttgggaggggagtttgggttagaatgggggtggttatgtttttttttgttttattttaggatttagttttttttttagggttgttatttttgtattggggtttttatttttgggttagggtttttaggaggggtttgattgtaggatttagggaggggttgaggtttggtgttttttgtggttagtttaagtttattgaaaataggatgggggtattaggtttagggtggtgtttatagtgatggtggtttttgttgttttaattttttggattaaaatgggggtttttggaaatgggatgtaaattgtataattatttggagaaaaggtgggtagtgtttggtgaggtttaagttatatagattttatagtttagtaaatttttttgtttttaggtttggttttttaattttagaaatatgtttatatttgggtagaagaaaatataggtaaagatattttttttagtattgtttgtaatagttggaaatagggaaagaaggaaggaaggaaaggagggaaagaaaagtaaaataaatatttattaattagggaaagggaaaatgaatttaaaatataatgtagttgttttttagtatttttgggggattggttttaggattttttatttagggatgttaaaatttataaatgtttaagtttttggtataaaatgatatagtgtgtagaaattatgtgtatttttttttatattttaattatttttaggttagttataatatttgatgtaatatttatattttattttattttgtagattttatatagtatttgatttgtggtatatttaagttttgatttttaagatgttgtaaataagattttaaaatattttttttttttgagatagagttttgttttgttgtttaggttggagtgtggtggtatgattttagtttattgtaatttttattttttaggtttaagtgatttttttgttttagttttttgagtagttgggattataggtatgtgttattatgtttagttaatttttgtgtttttagtagagatagggttttattatgttggttaggttggttttgaatttttgattttaggtgatgtatttgttttagttttttaaagtgttgggattataagtgtgagttattgtgtttagttggattttaaaatagttttgatttgatattattggaatttatggatgtagaatttatgaatatagagaattaattgtatatatgtattatattttatatatattatatatgtatgtatgtgagtattttttagaagatgaaaatgaataaataatgagaaatattgaaaataaagtgaagtgaaaaaatttgttaaaatggtttgtaaagtaggatattatttataatgtagatttttaaattatgtgaaataatgtgatatattgttggaattgtatttagatgaataaaatgatgatagtgtagataggaatgagatattgattttagtatgatgggtttgtttaggaaggaggaagtaggaaaaggtggtggggtagggtgtaaaggggtttttgatgtttttgtaatgtttttttttgttgaagaaaatttgagggaaataaggtaaaaaggttagtatttattaatgaggggtagtgtagatttatggatgttgttttagtattttgtatatgtttgtaattgtttttttggaaagtttagtttttatttttttgggagagttgtgagataattattaagtgttggagtttggttttttatattagggttggagtggttggagttgtttttgggattttttgttttttgggataagagttttatttttgtgagagtgggtggaatttaagattatattatatataattttatttataaaaatttgttgaagataattttagtgtggtgagggagagaatgtagaggtaagtgttagtttattattagtgggggattttgtgttagtatttttatagttttgggttttagtttttttatttgaaagatgtagtggttgggttataggatatttgaagattttgtattttagattttttttggtaggtatttatggttgtgggggtgtttgtggttgtgtaggtattgtttgttttttgtgtttagttgatttttttgtggtttggtgagagttttttatttttagtggggggttttgtagttgtttagattttttataagggggatgtgtagttggggagttagtttttttttgatgttttttatttgtttgttgtttttgatttgtgttttggtaggagggggttttgtaggtggttttggagggagggaggagtttgggaggaagtggatttgggtttttttttaggattttttttgggattatttgggataggttatgttttttttttagttatagtttaggtgggtgttttttttatatattattttttttaggttttagagtagattttttatttttttgttttagtttggggggtttattagttgtaaggagatttttatagtttttattttttttgtattgtttagatttgttgtggtgaagtttgttttttgttaggtttttggttaaaaaagtaattgttattttagggattttttataaggatatttagttgaggttttggggtt

SEQ ID NO: 103 - DNA, 7001 bp, Artificial Sequence
  chemically treated genomic DNA (Homo sapiens)
aattttagggttttagttgggtgtttttgtaaagggtttttggggtggtagttgtttttttgattagaggtttggtaggaaatgggttttattatagtggatttgggtaatgtgaggagagtgaagattgtaaaagtttttttgtggttggtaaattttttaggttggggtaggggggtgaggggtttgttttggggtttggggaagatggtgtgtggagaggatgtttatttgggttgtggttgagagggggatgtggtttgttttaggtgattttaggagggattttggaggagagtttggatttatttttttttaaatttttttttttttttagggttatttatagaatttttttttgttaaggtataggttaggggtagtgggtaggtggggagtgttaggaggagattgattttttaattgtgtgttttttttgtggggaatttgggtggttgtggggttttttattgaaaatgaggggtttttgttagattgtagggaggttggttgggtgtaggaaataagtaatgtttgtatagttatagatgtttttatggttatagatgtttgttggagagggtttgaggtgtggagtttttagatgttttgtggtttagttattgtgttttttagataagaaaattaagatttagagttgtgaaaatgttggtatagggttttttattgatgatggattggtgtttgtttttgtatttttttttttgttatattggaattgtttttaataagtttttatggataaggttatgtatggtgtggttttgggttttgtttatttttatagggataaagtttttgttttgagaaatggagagttttgggggtagttttagttgttttaattttaatgtgggaggttaaattttggtatttggtagttattttatagtttttttaaggagataggagttgggttttttaagaaagtaattgtaaatatgtatagaatgttagaataatatttgtgaatttatgttgttttttattaatggatgttaatttttttattttattttttttagattttttttaataaaagaaaatattatggagatattgaaggtttttttgtgttttattttgttatttttttttgtttttttttttttagatagatttattatgttgaagttagtgttttgtttttgtttatattgttattattttgtttatttggatgtagttttaatagtatattatattgttttatatagtttggaaatttatattataaatgatattttattttataaattattttaatggatttttttattttgttttgtttttaatattttttattatttatttatttttattttttgaaagatatttatatatatatatatataatatatgtaaagtataatatatgtatgtaattagttttttatatttatgggttttatatttatggattttagtaatgttagattaaaattgttttaaaatttagttgggtatagtggtttatatttgtaattttagtattttgggaggttgaggtgggtgtattatttgaggttaggagtttgagattagtttggttaatatggtgaagttttgtttttattaaaaatataaaaattagttgggtgtggtggtatatgtttgtaattttagttatttaggaggttgaggtaggagaattatttaaatttgggaggtggaggttgtagtaagttgagattatgttattgtattttagtttgggtgatagagtaagattttgttttaaaaaaaaaaagtattttaaaattttatttataatattttaaagattaaaatttgggtgtgttgtaagttaagtattatgtagaatttgtagaatgaaatgaggtgtaggtattgtattaggtattataattaatttagagatggttaaagtgtaggagaggatgtatgtggtttttgtgtattatgttattttatattagggatttgagtatttgtggattttggtatttttgggtggggggttttgaaattagttttttaggggtattaagggatgattgtattgtattttaagtttattttttttttttttggttaatgaatatttattttgttttttttttttttttttttttttttttttttttttttgtttttagttgttataaataatgttaaaaagaatatttttgtttgtgtttttttttgtttaagtatgaatatgtttttgggattaagagattaggtttggaaatagaagaatttgttgagttgtaaaatttgtatggtttaaattttattgaatattgtttattttttttttaaatgattgtgtaatttatattttatttttaagagtttttattttgatttgagaaattagagtagtgaaaattattgttattatgagtattattttgggtttggtgtttttgttttgtttttaataaatttaagttgattatagaggatattaggttttggtttttttttgggttttgtggttaggttttttttggagattttggtttaggagtggagattttggtgtaggagtggtagttttggaggaggggttgggttttgggatggagtgaagaggaatatggttgtttttattttggtttaggttttttttttagaggggttgtagaaatgtattgattaggttatttaagaaaagatagtatttttgttaggttagtatgtattttttttagggtttaattttttattgaagaagaaaagattttttttgttgtttatttttttatgtagttttttaatagttgttttttgaatgttaattaaagttattgttttagggtttggggttattttaaggtattaggagatgaggatttttgtttttatgtgtttttttgtttgttgtagggaggagtgtaatgaataaataattaatataatgtgttagttatttgttttatttattaggaggtaataagagttatgaaagagaaagttttgagtaggggaggggagtgaggtatggtataggagagtaggaggttgttttttaaaatataggagtttaggggattaattgggaaggtgtgggagggggagggagggagttttatagatataggggagtgaattatgtttattttgttagtttttgatggtagtttgtatatattattttttttttttttttgtttttagttttttttagaaggagatttaatttgttgtttaggttggagtgtagtagggtgattttgatttattgtaatttttgttttttaggtttaagtgatttttttgatttaatttttagagtagttaggattataggtatttgttattatgtttggttaatttttgtattttttttttttgtagagatggggttttgttatgttggttaggttagttttaaatttttgattttaagtgatttgtttgttttggttttttaaagtgttgggattataggtgtgagttattgtgttaggtttataattttattattaaaataattttattgtaaaagaattagtttaggtttagatggaatgggttttatgagtttttttttttttttttgtaaggttatggtggttattttgtgagttattgttgttatggttaagtttttttttggttattttttattatgaattatttttgtagtgagtatagtatttattttggtgggagggttttttagatatgagtaggatttggattaaggttaggttggaggagatttttatgggaaagagggattttttgaattttagattttttagttaagatgattttattatatgttgtttttgtttattagtaaatttttttatgtagtttgattatgtttaggaaatatttttgataaaaattagtggagattattgttttagaggatttttgggtttttttaggtaaatgttatttaatgttttttaagtaaatagagtttgttttataaaatttggggtttgggtggttttttatttttgatttggggttgtttttggagtagagaggaggtaatggttattatggagaataaggtgatttgtgttttggttttggtgtttatgttggtttttggtattttggttgaggtttagataggtaaggtgtgtttttttttgttttgtggggttatagttagttttggtagtttttgttaggagttattgttttatatatatatttttgagtatttgttttgtgttaggtgttgttttaggtttttaaaagtatatttaatttataggattggtaaaagtaggtggagagtaatttagggtggtagggtttttggagatttttgagaagtgtgatgaggagggggttgtttttagttggggttgtttttttgtgttaggaagattatataatttttttaagtgttatgttttaaagaggaagtgttggtgtggggttttagaatagtgtttttgattgtttatgttaatattttttttaggggtagatttttttaaggtttatttagataggtttaaatgttggttttagtgatggttatttgggagatttttttttataggtttgaatgtttgttttagtggtggttaattgggagatttttttttataggtttttgggtttttttgggatttatgttttgggagttaaagttattttttttatgagtgtgtggttggtaatttatattttttggtgttgttaagtggattggttgttttgggtttttttagggagtggaggaggaggttatttttgtttttttgggaagtgtttgtattttaatttttttatttgtagaatggattaatggtttgttttagggttgttaggaaatgttgtgtggtagtatttgtgatttgtattttgttagttgtggggagttgaataatttatttgttgttattaggtatagttttaaggtgggggtaggagaaagggttttttatgtttttaaagtaagggtttttagagaggtttgaagagggagtgtttagtggtgttgtttgtgtttttattgttttttagttattttttgatttttgttgtggggtattgggtttgaggggtgggtttgggtagtgtagaagagtagttagtattgggttgtagtgggaagatttttaagtttatggtagggagtgggggagttttggaatttgagagaggaagtggttttggtgtatagaatgaattgggtgggtttttgtgttggttatttttaggtttatttgtttgtgtttttgtttttattttagtttttagttttgttttttgtgttgtgggattatagaggttgtggtaaatttttttttttattttatatattttttggtttaaggtttagagtgtttttgtgggttatttaggtttatgattttgttataattgaaatttagaaaattgtgattatagtttagtgtatttgtgtgtggaaattatttttatttatttttattatgtgataaagataaagtgggtgggtaagatagagtttgttggaggtagagtattggggttggaaatttttttttttgaggaggaaatttttttgatttttaggatgatgatttttttttattatggggttttttttgatttttatagtgttttgggggtgggtgatgattatttttatgttgtgatggatttagattttaggagggtaaggtttttatggaagttgttgggtagtgggagttgaatatggattttttttagtaagttaggaatattttttttaaagatattttgaggtagtttttgatagtaaagtagataagagaatagttttttttggttttttttggggtgtttttatttgagttagtgtggttagattgagtttttttttttttatgttttaaggtagggatagggattggagggtgttttgggttttttttttattttttgttgtaggttgttaattattagattttaataggttgttttttgagatttttgattttgtggagtttagagtttgaagttttggtgttagaattttttgtataagattttgtggtagtttttagttagttttatttgtttatgtgttttttttttttagatttttttttttattgttttgttttaagttgttttatagtttgtattttttgttggttttttttagattattttatttggtttttttattttatttgtaatgggtttttattttttgaatatatttgggtttttggaatggtttttgtttatgtggttttatttttatttggtgaatttttttttgtagggagtttttttgttttgtttaatttgtttgttattggtttttttggggagtgttttatttttgtggttattttgggtattttgggatgatggttttgtgttgttttgtatatgtttttgttttttttttttattagatttttagatttttttttttttttttttgagatggagttttgttttgttatttaggttggagtgtaatggtgtgattttggtttattataatttttgttttttgggtttaagtgatttttttgttttagttttttaagtagttgggattatagatgtgtgttataatgtttgtttaattttttgtatttttagtagagatggggttttattattttggttaggttggttttgaatttttgattttaagtgatttattttttttagttttttaaagtgttgggattataggtatgagtttgggtttagatatttagatttttattaatgatttttttggttttaatttttgggttttttttatttggtatagtgtttggtttttgttatgttagtttttattttttatgtatataaatggtgtttagtaaatatttatgtattgagtaaaatttaataattatttgttgaaattaaaaagtgaataaataagttatttagaaagatgtaaagtttataaatttggggtattttgtattttttttgagtgtaatgtttgtatattaggatgtgaggattatgttttttttttatgttttgagggttttatatttgttttattggatagttgttgatgttat

SEQ ID NO: 104 - DNA, 20 bp, Artificial Sequence
  chemically treated genomic DNA (Homo sapiens)
ggagtggaggaaattgagat

SEQ ID NO: 105 - DNA, 22 bp, Artificial Sequence
  chemically treated genomic DNA (Homo sapiens)
ccacacaacaaatactcaaaac

SEQ ID NO: 106 - DNA, 33 bp, Artificial Sequence
  chemically treated genomic DNA (Homo sapiens)
tgggtgtttgtaatttttgttttgtgttaggtt

SEQ ID NO: 107 - DNA, 22 bp, Artificial Sequence
  chemically treated genomic DNA (Homo sapiens)
gtaggggagggaagtagatgtt

SEQ ID NO: 108 - DNA, 24 bp, Artificial Sequence
  chemically treated genomic DNA (Homo sapiens)
ttctaatcctcctttccacaataa

SEQ ID NO: 109 - DNA, 20 bp, Artificial Sequence
  chemically treated genomic DNA (Homo sapiens)
agtcggagtcgggagagcga

SEQ ID NO: 110 - DNA, 27 bp, Artificial Sequence
  chemically treated genomic DNA (Homo sapiens)
agttggagttgggagagtgaaaggaga

SEQ ID NO: 111 - DNA, 144 bp, Artificial Sequence
  chemically treated genomic DNA (Homo sapiens)
gtaggggagggaagtagatgttagcgggtcgaagagtcgggagtcggagtcgggagagcgaaaggagaggggatttggcggggtatttaggagttaatcgaggagtaggagtacggatttttattgtggaaaggaggattagaa

SEQ ID NO: 112 - DNA, 22 bp, Artificial Sequence
  chemically treated genomic DNA (Homo sapiens)
aacatctacttccctcccctac

SEQ ID NO: 113 - DNA, 32 bp, Artificial Sequence; identical to SEQ ID NO: 15
  chemically treated genomic DNA (Homo sapiens)

SEQ ID NO: 114 - DNA, 14 bp, Artificial Sequence
  chemically treated genomic DNA (Homo sapiens)
ttcggttgcgcggt

SEQ ID NO: 115 - DNA, 16 bp, Artificial Sequence
  chemically treated genomic DNA (Homo sapiens)
tttggttgtgtggttg

SEQ ID NO: 116 - DNA, 164 bp, Artificial Sequence
  chemically treated genomic DNA (Homo sapiens)
gttagtagagattttattaaattttattgtatagtggcgcgcgggcggtcggtcgagttcggttgcgcggttggcgatttaggagcgagtatagcgttcgggcgagcgtcggggggagcgagtaggggcgacgagaaacgaggtaggggagggaagtagatgtt

SEQ ID NO: 117 - DNA, 22 bp, Artificial Sequence
  chemically treated genomic DNA (Homo sapiens)
gttaggtgtatgggaggaagta

SEQ ID NO: 118 - DNA, 19 bp, Artificial Sequence
  chemically treated genomic DNA (Homo sapiens)
tccctcccctatcttacaa

SEQ ID NO: 119 - DNA, 20 bp, Artificial Sequence
  chemically treated genomic DNA (Homo sapiens)
acccgaaccccgcgtacttc

SEQ ID NO: 120 - DNA, 24 bp, Artificial Sequence
  chemically treated genomic DNA (Homo sapiens)
acccaaaccccacatacttccaca

SEQ ID NO: 121 - DNA, 166 bp, Artificial Sequence
  chemically treated genomic DNA (Homo sapiens)
gttaggtgtatgggaggaagtacggagaatttataagtttttcgattttttagtttagacgttgttgggtttttttcgttggagatcgcgttttttttaaatttttgtgagcgttgcggaagtacgcggggttcgggtcgttgagcgttgtaagataggggaggga

SEQ ID NO: 122 - DNA, 25 bp, Artificial Sequence
  chemically treated genomic DNA (Homo sapiens)
gtaggaagaggtgttgagaaattaa

SEQ ID NO: 123 - DNA, 25 bp, Artificial Sequence
  chemically treated genomic DNA (Homo sapiens)
ccacacaaaaaatttctatactcct

SEQ ID NO: 124 - DNA, 18 bp, Artificial Sequence
  chemically treated genomic DNA (Homo sapiens)
acgggtagaggcgcgggt

SEQ ID NO: 125 - DNA, 30 bp, Artificial Sequence
  chemically treated genomic DNA (Homo sapiens)
atgggtagaggtgtgggttatattgttttg

SEQ ID NO: 126 - DNA, 264 bp, Artificial Sequence
  chemically treated genomic DNA (Homo sapiens)
gtaggaagaggtgttgagaaattaaaaatttaggttagttaatgtatttttgtcgtcggttgtaggtttcgtttttgtattaagcgggcgttgattgtgcgcgtttggcgatcgcggggaggattggcggttcgcgggaggggacgggtagaggcgcgggttatattgttttggagtcggttcggttttttgtgttttttttagcggttaagttgcgaggtatagttttttattgttttaggagtatagaaattttttgtgtgg

SEQ ID NO: 127 - DNA, 26 bp, Artificial Sequence
  chemically treated genomic DNA (Homo sapiens)
gtgaggtattggatttagtttatttg

SEQ ID NO: 128 - DNA, 24 bp, Artificial Sequence
  chemically treated genomic DNA (Homo sapiens)
ccctaaatctcatcctaaaaacac

SEQ ID NO: 129 - DNA, 24 bp, Artificial Sequence
  chemically treated genomic DNA (Homo sapiens)
tgaggtttcggtttttaacggtgg

SEQ ID NO: 130 - DNA, 27 bp, Artificial Sequence
  chemically treated genomic DNA (Homo sapiens)
tgaggttttggtttttaatggtgggat

SEQ ID NO: 131 - DNA, 168 bp, Artificial Sequence
  chemically treated genomic DNA (Homo sapiens)
gtgaggtattggatttagtttatttggtttcgaagtttttgttttcggaattcgggtgttgtgggttgaggtttcggtttttaacggtgggattggtgttttcgagatgaaatttggggttttttcggggttttggtgggatcggtgtttttaggatgagatttaggg

SEQ ID NO: 132 - DNA, 168 bp, Artificial Sequence; identical to SEQ ID NO: 131
  chemically treated genomic DNA (Homo sapiens)

SEQ ID NO: 133 - DNA, 168 bp, Artificial Sequence; identical to SEQ ID NO: 131
  chemically treated genomic DNA (Homo sapiens)

SEQ ID NO: 134 - DNA, 24 bp, Artificial Sequence
  chemically treated genomic DNA (Homo sapiens)
ggagggggtagagttattagtttt

SEQ ID NO: 135 - DNA, 21 bp, Artificial Sequence
  chemically treated genomic DNA (Homo sapiens)
actcccaacttcactttctcc

SEQ ID NO: 136 - DNA, 24 bp, Artificial Sequence
  chemically treated genomic DNA (Homo sapiens)
taatttaggcgtttcggcgttagg

SEQ ID NO: 137 - DNA, 29 bp, Artificial Sequence
  chemically treated genomic DNA (Homo sapiens)
taatttaggtgttttggtgttaggaggga

SEQ ID NO: 138 - DNA, 144 bp, Artificial Sequence
  chemically treated genomic DNA (Homo sapiens)
ggagggggtagagttattagtttttgtatttagggatttttcgaggaaaagtgtgagaacggttgtaggtaatttaggcgtttcggcgttaggagggacgtatttaggtttgcgcgaagagagggagaaagtgaagttgggagt

SEQ ID NO: 139 - DNA, 23 bp, Artificial Sequence
  chemically treated genomic DNA (Homo sapiens)
agttggtgatgttgattagagtt

SEQ ID NO: 140 - DNA, 26 bp, Artificial Sequence
  chemically treated genomic DNA (Homo sapiens)
ccctcccaatatacaaataaaaacta

SEQ ID NO: 141 - DNA, 15 bp, Artificial Sequence
  chemically treated genomic DNA (Homo sapiens)
acaccgttcgtaaaa

SEQ ID NO: 142 - DNA, 16 bp, Artificial Sequence
  chemically treated genomic DNA (Homo sapiens)
acaccattcataaaat

SEQ ID NO: 143 - DNA, 189 bp, Artificial Sequence
  chemically treated genomic DNA (Homo sapiens)
agttggtgatgttgattagagtttttgtagttttaaatgatttttttaattaattttaaatttttagaatttatcgtataaaaaggttatattttttggagggacgtcgatggtattaggatagaagtattaggggattttacgaacggtgtcgtcgaaatagtagtttttatttgtatattgggaggg

SEQ ID NO: 144 - DNA, 27 bp, Artificial Sequence
  chemically treated genomic DNA (Homo sapiens)
tttttagttggtttttattagggtttt

SEQ ID NO: 145 - DNA, 22 bp, Artificial Sequence
  chemically treated genomic DNA (Homo sapiens)
ccaacatatccacccacttact

SEQ ID NO: 146 - DNA, 21 bp, Artificial Sequence
  chemically treated genomic DNA (Homo sapiens)
tttcgactaatctcccgccga

SEQ ID NO: 147 - DNA, 32 bp, Artificial Sequence
  chemically treated genomic DNA (Homo sapiens)
tttcaactaatctcccaccaaatttactatca

SEQ ID NO: 148 - DNA, 155 bp, Artificial Sequence
  chemically treated genomic DNA (Homo sapiens)
tttttagttggtttttattagggttttagagtttaagatttagtattcgcgggcggttttgggaagtttggtagtttcgttaattttaatatgttttatttgatagtaaattcggcgggagattagtcgaaagagtaagtgggtggatatgttgg

SEQ ID NO: 149 - DNA, 28536 bp, Homo Sapiens
gctctgggagctaggtttctctcgctggatgggaaaaggaggtgcggaaaggggcaggcggcctgcgggctagcggggatgagagttgtggggagaacggaggagagagtaaaattattccttttggaagtccaagggaagggagctgaggtgagagaaatggcctctcttaggtcccaagtctccgcccccagcctgcaccactcaagtcggggaagtgacaactcttcctaaacctcgacttccattttttgtttcctgcagattgattgatgtcctcgcgttgttctagttcagcaaccaaactaggccgaggtacacctcttttacccagagctcccaaatcactcaccaacctgcaggagacctaaatcctccgggcaggtctcgttagcgcttccagcccccatccccaaatcccctcttctagctccttccttcccctccgccctttggccctccccgccccctaccaggctgagaggcggagaggccgggaccgctgggccctgcggctccagaagccaaagtccgcccgtggggaccgttttcctctccactgctctcaagtgaacaacatggtgggaggtgaccctcgtccaaagggcttttatctgccccccactgctgcgtgatccctccgcaagtcggaggcagagctttaaaaagaaagaaagtgtgcgttgagcactgatcttaaatcggggacattatctgcgatctctttaagtggcagcagcagtttcttgcagaacaaagactcagtgttcgagctccaaaagcttctaggtaaagtttcattcagatgaaagcaactaaggcgaaaaaacaatgatattgtcggctccagaaaatcggcggttactttttgctctaagttccccagcgtggtgtttgttctcgcccactttggttgtgcggggggttgacaagcataacaaaagatctcagcacatccctccccccacctccacaacgaccctcctagcgccatgaggatgaattctctgggactaagtggtatttgtttctatttgttatgaaatcaaatttcacatttttttaaagctgaaaatcgcggataaagaaggatcgggtgcttaaagttcatttaaacactcacaccgaactcattccctgtttagatgtcagaggatggcagggagggccagggctgtaattcatcttgatttgcttcattgtcctgcagtttgcaaactataatcctgtataatttcaggaacaagcaggtttagaattaatgggtcaatattatttaaaacaaaacaccgggagcatgacctttgcctcaactacatattgctcgacaagactcaggaaactccactctaacctctcaacccctgagttctttgagaaactgaagggctgtagttattagaaatcatctttgtttcttttaatgtctccaaaggatttggaaatagtaatgcaatataacatgaaggatctctctacttaagcctgaagataaacgtggaagcctaaatattttgaactggagatgtttccctgtaaatttattatagatgtattcctcctgagagaaatgcatataaactatacatgtatacatgcacaaatatttctccagaacaatttgctagaggtgtaggtttccccgtaaaggagtaaacttgagagtcattttaagctgatggacttgctaaatttctttcttcttttttctttttcatattatttgctagccataatggaatcctctaggtttaagccaaagaaaaattggagagacaaaattagattttgtagcccttttcccccccgggaatgcctttttttttctttttagtttctgatgaatggctatcatttatttctaccaaatttaaataaggactgctgccttgtatgtttaactaggcaggcagagggaactggtttgtttaggaagcagtgactgagatgtcctggccaagttagtgacagaggaggggagaaagaatccagaccaatttgtatgcagtatattttactcccatgaaataaaacacatttgtttcatatttgctgaaaagtaaaacaataatattgtacgaaatgttatacacagggtaggttgtacatagcagtttcagaaacatcattgcatccaccagagaaactattctaaaactgatattcacacattttttataataataataatatgttagaaacatacagtgtggcatttagtatatacactcccttgctcgcaagcgaaaaatcctaatcgcttctgtataacatgctttattttaaagcctaacctttaaaaacactgttgtgatattactaacaactgcttttataaaattaatttgacatttcgatatatatacatcctttcagtcatttaaatgttaacaatgctaaacttaaaaaataacaagcttatagtaatgttaaaatgtcatatccagtcaaacatttgtttgtgtatgtgtccttgcaactgttagaaatacttgtagtgaaagatgtcagacactgaggacatccctttgaaatcaaaggagctctctctttgattcagtggtttccttttctctatatagcttctctttctctccctttctttagtgcccacgaccttctagcataattcccagtctttcaagggcggagttgccccatccggcaaggtcctaggatcccggcgctgtgggtgcggctcacacgggccggtccactgcatactggcaagcactcaggttggaggccgggttctgcacgctggcgtagccgaagctggagtgctgctttgctttcagtctcaggctggccaggctcgagttacacgtgtccctataaacatacggaggagtcggcggcgcgtaaggacaggcaggcgtcggcaccgcggaattcagcgacgggctactcaggttgttcaagttattcaggctgttgagactggagcccgggacgcctgtcactgctgagggcaccatgctggacgacatgctcatggacgagatagagttgggtggggaaaacatgctctgtgatgacagggggttgacgttcatagagttgaagaaggggaagctcttggtggatagggaggcggatgtaaggcccttggcggcccagttgttgtaggaatagcctgggtacatgtcgtcgtagggctgcatgagcccattgaactgcggcccgaagccattcttgcatagctcggcctgctggttgcgctccctctttctccatttggcccgacgattcttgaaccaaacctgggggcggttggggcaagggagcaaacagatgccacagtgcagattactaaaacttccatcggaggccaacccccgccttcccccgacacacacgctagcgcactcacacaccctggcctcgcttcactgcaccgccctgcacaccaagataccagggccagctttcagttactggcccgggtctccaccaagcgcaggagacctggtctgctctggcctgcgagctgggactcggagctacgccacaaacctcagccgaacgcatggagacctgcggacggtttgatcactcagccaggcgtttctccaggtccaaaaacacttaatgtaaaacaaacgcggggcagcaggcttttccaacccttcccggggcaccttgcaaacttgcttccattccaaagccacagacccacggatgaggagaaggggctggaagggcactagaggatcgctctttctcccacgcaattcctcccttccttccctgacctccactgtcgtcccccaccccctggtacgtgctcccttaacagggactaggccgccaacactctttctcgcctagcaaaacaaccaaataaagagcaaaagaccacctcttcgtcagctcgttaactccaggagcttggcatattaaactccgggaacccggaaagggtagttttggagattcccccttctttcgctctgcctcttctttaccctaagcccaccacaggcctgtccgcgcgccaggcccagccgggtcgtttggctttgcaggcggccacccaggccggccggcttccacccgtgtccggtggcccagccgcaaccccgatcccaatccacatcgggcctccctgtcgccccagacggcggcttttgtgtattggagagaggcctggcctgagatatccgagctgacaccagtgatgtttcacattacacatctccgccgggcccagccgtgtaatccgctttttctctttttcctttcattcttgatttcctttttatcccccttcctctttgcacccgactgctataaaaagcacgcctcactcccacttggctcgacaagcagccgccctggaaggagaggcagctgcaaggagagcccagcgccgcggctacaaagcactagggtggagctgcggaatagcgggcggggtgggagggcgttttcgaaggatcccagaaaacccatagactctgtctttaattacttgccatttctaccctaggccatctaaactttgctcaggcgagaagagtacgtgagaggcccgttcccttgatgtgcaagagagctaatgaaagactgaccttgctcaaaaccacgccgcccaggacccagctctggctctggacagttaaactaaaaccattttcaacttcttcccggccttttatccaccagcatagcctcatgccttgcacaaatgccacccagagagtgtcttcattccctctgatttgggagagcattttggtctttattctttttatcgttgttttcttctttttgtttgctctgctctaaccgggggctttattttttctacccagagcacttaattttttttttttaacagcaaagcctctggatgccgcttgatttgcttgattctgttttctgcttccagaatcctaacaaatttggaatcttccaccgaccagcataaaccaggacgttgctattgggttatttatttgagctcatttttgccaatccataaagtacagatttgctacaaagttaaggtaagccctttttacaaaactatgattataatttagaagagggggtgtgagtttcaatttccagagttcaactcctgagagaagataaataaaccaagcagaaaagtctttcttctttttttctttctccttctaagaggactagtagttgtgtattaaaactttgctcccggagatcacaaaactaggaaatagggtgtgtgggagagacctgaatggccgaaacaaccgtaaagaaggtgtaagaagcgcgagcccaggagggaaaaagctgggccagggccgggacaaaggtttcccagggagggccaactcttccgtgtctctggcgggttttccttgttaaaggctcacaggttggagcctgttcgcggctcttggcctggtagggattttattagctctgctctggcaactgcaagccaggaacacaatgtcctgtgcaggggattgcccatgcagcccagctcgtgagatcgcgggatggcggggcagtgagccggtgccgctctgggagcctgagccagggcggcagtcctgtcggcctcggagagggaactgtaatctcgcaaccaggccgccgcgaggccttctgcctttgcaaagctgcgccccaccggcgccctcccaggcggcgctgccttccacattctctcctggtctacttggcctgtacctccacaacatcctccccccatccctcccagactccgtgctggctcctacccggactcgggcttccgtaaggttggtccacacagcgatttcttcgcgtgtggacatgtccgggtagcggttcctctggaaagtggcctccagctcctggagctgctggctggtaaagtgagtccgctgccgcctttgccgcttcttcttagacgggtcctcggcgcccacgtcctcattcttcccctgctggcttttatctttctctgaaaacgaaacacacacactttcccgtcagcatgcccacctgcaacgcggacgccaactggaccggcggcagaagccgtggaagagctgggctgcctggcgccggaggagggtgcgcgcggcggctccgggccgcgaggagcgctgcgcctgtggggtgtgcaggcgcaagtgtgggtgtccgcgccccatttcctcccctcccccagcgccgcacgttttatttacatgtttatctcactgcagcggcacattcacttttatagcctgtgctttcaagtatatttatacacctctgcgcagacacaccaaatctcctgggacgcgcacacgcgcgtggtttacagacccccctccccctcgcagaaagctcagatttccatgcggtttgggaaggctaggaaaagatgtggggattcggttgggcaccgaagttcgccggccctttcccaaaaaaaaaaaaaaaatgcctcttcgcgaagggcatttctgagtggtttcaggcaatttcctaacgagtggagctcctcgggagctgaaagccgagaggaaaacagggacagaggtcggcggcctctgaaggtcctcgaatcaagatgctgggatttttgtgacccaggaaacagaagggaggccagggtacgaatagagagggcggcagaattgctcgcgcccttagcgccccaggagccgggccggtcgagggagaactaaagggatgcggggtagtcaaaattccggctcccggaagttctgcggggagccaggcgaacgaccactcccaccacgcctccccccggaggggctgacttccttggggcgagagggagcgggtggcgcagagcagctgagcgggaatgtctgcagggcggcgcggcgccttacctgcggcctccgggctggaggtgtcggagatggtgtgcacctccagcctgtgcttggaggagtccagcgaccggggctgaccgggagccagaaccgaagccatggctaacggctggggatggtgacaggaagatgaggagacggccgacagcttggtccccgctgctcggtgctccaagtgaagcgggcctttcatgcagttcatggacgagggagcgcgacgctctactagtccttggctactgccccgccgagcccccgtagccgccgctgcccgctccgggtcgcgctctaggcgcggagtttccccgctgcggggagagccaggggacgcaacccccgccgagttctcaagccaagctgcccccgtctcctccggaaggctcaagcgaaaaagtccggagacggaaagtcagcgggcaaacgaagacatgggatgtgggcagaagggcaccactcagagcgtctttagggagcaggcttccaagctccaaagcgaaacaagagtgggcaaagacccccttcttctctccctccctcccccaagaacccctccaataaggaaagctaacgccgaccgcgctctgcccgccccccccccacgcggcagccctgacagagaagtgtcaagagtgacagggacaggtaggtgatattagatcccctgcggcggcagcagccgctgcagccacgacgcggccctctgagcgcaccctccgcaacgcgcacacgcacacccctcgggcggtcgaacaggagccgggccttgccgcagctcagctccaggcacccaggcgagcgacggaccagatctgcggctccgcgcttccctgttggcctaacatcttaaaaccagaggcgggcttcctggtgccgagacgtcactccgccgcggccctccccagccctctccgcctccgcctcctcccagacccttctccgggtgcgactgacgtggctccgcaccaatcaggacgccccgagccgcggtggagggactgtcctgcctgcacctatcagcagtgcggggccgggctactgcctcgccgtgcgcactgggtctacacaggcaagctcccgggaattcagctcctgcccagcccaaggcgatccggcttttagtacgaacccaaaggtgaagagatgaggctaggagtcgaaggcttgggagaagagagtggaatggtcaagaagagaaaggtacaaggatcaacaagacacccactctttgtgtctcactacatccatttccaatcccccaccccatataaaaaggagacacgttacttaaaactagaaaatttgaaaaacagcaacaaatcacctctccgatcttaaattttccaaacagcctgtcaagtgaatgctgcgctaatctgaagaagctttaattgcaaagaagacagagccctgaaaaggcaggctaataaattagaaatcgagaagcaaatggacccgtcaaaagaaaattaccttgactttaaacgaacaactgtttggtggttcactctggatttatacaagaataaaaagtcgcctcagatcacgttctctgtgatgcttattagtccccagacagaaaacacacaatagaagagaaaccctaacccagcgttttcaaaatgctgaaagcttatccattctacttaacgttgattaagacacatatcctagatctttcaaattccttgtacactgtattaagctcgtcctaacccgagagagccacgctttaaattcgactctcttgtttactttattatcaatcagatttaaatccataaagcctgtagaatcaacaaccttgagctaattatatatgaaatatgccttaatgaatttccatacaattaagaatgttgccaaataaccaatttcaaggataatttttaacagtcattttcttttcccagtgagctcaaggctgtcttgagccattaaagtccaagcaggcagaaggggtgtgtgtgagctaagggcgaaaagcctagaactgcgctcaactagcaaaagcaaaaccttatttatataaaacaaaaaaaatcacctttggagacatcaactctttatagcactgtttccaagcaaatttaatttccaaagaaattaaagaaagaaatccaaacatattcaaaataatttttgaaagtccttttgtcccccagcataggtcagctggagaggacaaactaatctcctctgggtttctgcatgggcgattgttttactatggagttagtgttatcatctctgaatgtgtatttgtttgacattacagtcaatgatttgcaatgccagcatgaagtatctttaaaacactccctccttgtccttgttcacaagattgggaaacttattcgatgtggaacaaagtggatgaagcagactacaaatatatttgcaacttatgtgtctctcctttgccctgaccacccccaaaccctatctgcaactcctccccattttaaacttgcagtccaaagacgcacatgagaattgtttttcagtctttcttcaccagtatcatcccactttaagaataatttagctgcaagggaggaatttcttcatagtaagctttaaatcagcatttctgcttttaaccttttattccactttaccccattccacacatacagacacctgctcagagtaaaacacatcctcatgtgacaggtctgcattagctgaggctcatacatccagctatattaggtcctgcaatcttatcactaaattatacacattacactagcagcctgttggtaaagaaggttaaattaatttacattctgctcattatctggtgcttaaatgacgcattttatcccggagatttggcggagaatctccttctcagaccccacagcgtttcactgaagacaatgctcttacatttgtagtggtttttaatctgataagactctaatttgcttaagtcttttaaataagggttttaaatgtttctagccgttttcttattgaatttcctctaattcccccaagatcataaagtatatgtgtaaagtaaatatttcctcccattgcactgccagccgatgacctataactaagtcaataagaatccagctcttttctgctgaatgtgtttactaatcatattccagtttcttcttttaaacctcagaatagctgtggtccccacaataccatgccccttaaagcttcatttcatgaagggactccatcacattaaagaatgaaaaaaatctccactgtagttagtatacacagcccctcactccttgtttttcaagattcaaaccccagagctgcaaatatttttggaagcttgggtgttaatgccttattttagaaagccgagaagccccacagagccatatagatttctaaacccatctctcataaacccacagaattttgataaaagctctggtggctccactctaccgatggaactttcatcacgacaaatatacatgtatgaaggacctcaatcagcctccaaagtggttgaaaaacccaagggcacgtgactgctcctcatagtgccaacgtgtgcgagatgttggaagcactggggatcagcagcagcctagatgcctaaaaagataaggtgtcctaatttgtgtggacccattgaagtcaagtggtgaataaagacaattatctagataattcagattaaagtaaaagcaaaaccatatctatttgtatatatatattcacatccattttatattacagacacacacacgcacacacacactggctctgtaaacaactgactcaaagtgaggattttctttgcatttttccagcaggagtttcaacattctcctaatctcctaatcactttacacactcacagcagcggcgattgggtgacattcttctcaggccccctgtgtggcaggacaccaacatgataagtctgcatggggaaaaggaggtatgtggtgggaactaagaaacactgtccagtgaaaactctgtggcatggtggtggttgattttggagatttaatgtacataagacttgtgggtgcacaggcataggcagcatggatgagaaaggggccagaagaaaataaatcttatgcattttgtgattccagcattactgtgacctctggctaagttcttcttaattggttttagaaattactatgagttcagcctctaacacagaaatttccaatacggagaacattggtgggatcctggtagggaaactagaggtgctgcatggctcacgtggggcaaagaaggaaagcccagtgccggcgtgaggttttgagtctgggagacatcaggggttgtctcgattggggtttcttgcttattctttcaaagaaagaccctagaggagggaaatgtgtgacatggggtcagccgtgttttgtgctggtatttgccaccgattaccagtcttaaagtcttatttaatttcacactcttcagtgttagttgtgcaaagtccctctggccatggcagtgagcggttgggctgtgccgccaaactctccgtatcaatctggcctgggactcaaccaagtgatctctgacttttggaaagagtctgtcttcagagttcacccagaagatggcttaattagacatctccctgagctgttaggccttagacgggtgggagtcctgccctgcccaagctagctcaaggacgaggcccgcctggactcagcttggagccacgtgatgggcgtgagtgtgtgagctcctggtaaggcgcagaggtcagatggagaccttgcatcctgcccgagaagtgccccaccccctccaatatctggcttttctctgcatacaaaccaagctgaaaacagtccactacccaccacccctcatagctatggaaccaaataacccagaaattaaaagcttcactgtagctgtccttttccccatttcctaaatggaatttaaaaagctctggcttgtcaaaaggggaagattattttctgaattggaagtctgtagatatattgagcaacagccaccctctctgggtccctgcaaatggtacccatttttccaacccacagctctagctgctcaaccatttgagatttggggtaactacctgggggaacagtgttcagatggcagtgggagttaccacctcacagtggcctggggaagagaagagaaagagattagaggagggggcatttgctaaaatcactcaacgaacatgctgttaatgcttcctcacatttgcatgttactgccacagttttcctaggtgtcactgagtctccagaaagcaactacttgccgaactaagtaaaataaggagaatggtatagcacatgtgtttggagaaggggaaggaagggtggaatatgaaattgagcatagatatccaggtcaggaaagaaggaagtggcaaggggctaaatgaagtcccacccccccgccacttttttaaacaacagttggattaaacactcatctgtcttcctctttttctcttttcttccctctccagcttatgtccatctcccttttctatttcttttgctctcccttctttctgttttctctctcccagacatgctggtagctaacattcagcattagttgtcatggtgaccataaatcacctaaatccaaaaatacccacctataatctgagatgaagcttttatttccctagcgaaataatattttaaaagctgtcagctgacaaaaaaaaaggaacccacctcattgtagtaacccaagtaatatattacttctaaaggtttaaattaaaatgtcagcctgttaaaaacatgctggtagagtcttggacactcttcccgtcagatcctcacaaagaagttgactctgtcattcctggtcgctctttaacatacacacacaattctgtatgctctctccctttctattaatttcttcctcccctaccaactactttagttctcaaagactctacgcattgggttctaaaagaaaagaatctcctcctggatcagaaaacagcctcattggttgctgaagtgaaagatgtggggtttagggggaaaggttattaggaccataatggcggtggtggtaggaggtcatcctagaggagttaagaagaaaaaaaaatgcagggagaaggactggaggtggaaagacagagtaacagaaaactgagctgggtggtcaggtgctgcggtgaagtctagccccgaaatgataggtatatattctcccactcctgcctttttctcctctgagagaaaactttcctagtcagagaccctggggggtaggaggcgggcaaacgccgctgcagttgggccttttgtcttctaccttgggcttgttgtcttttgcctatcttggattacagggtattcgcctagatgaagagccattaattacccattcagtcaatattaggaagacgacaaagctttttacataggattaagaagacatcagattgttccattagtatattcctgctcacgaataagctttcgttatacatttccttttcccccgagccgctctaacaactgctgcatatattagcagcgggcggtgaggaataacagccgaaccagccttaagaaactttgtgtaccgagtcagcagcgaggaacgcgacctgtgaagaccacttttgcgggcagggatccgcagggactgactactttcggacaactggtacaatttcccctgggggtgaaaaaccacaacgcggcggggcacctttcaagtgagctgcagatttgattggcgcggggggtgggggaggggaggggagaatgggatggcggaggtcgggcggaggaaagaaaatggaaaactctccttacccctatttcgttgctttttcctcaagcctcatgcccccttcggcaagcacctgtcccttccgcgctagccacagctagagttctccacctttctctacacatccccttctttctgacaaggctcaggaccttggtcaccaccccacgcaccaccattttgcgttttgctagagacggtctgggctgatctcgctggtgtccatgttaggattaaaatcccttcatgacggcgaggaaaactgtattatttgctttcagggggtacattaggagtccacgtagtatatgctccgcaaacattcgctgattgaatgagaggcgcgggggcggggcggcggagaggggtctgcggccgccaaggccgccagggttaacccaggtccttcgaagaaggttgggaccgagctgctgccgcgtgtgaaggtgtgtgtcgcggctgggggtgccacaacgggccatggagcccacctcccagagggaggaagtctgtgcacaccagcgacttgggtcgaacactttcagcccatccactgggccaaagctatttaacaattaatgcgttcctgggggaggccgggggaagtacccgccccttgtcgggacgcaaagccaggcgtcaggtccaaaggggctgcagtgcagtccgatttcagcacggaacccagagccgccgccctgaaactttttaagccagtgacagaggagggtcagtccgtcctcctcctgagggtgaagaccattttatgagttcctttcaggacccccaaagcaagaaaagccaaagaaaggtctctttgctctagggggtcgttctcagctggcttctacaccatcttctgctagctgcgtccaccctctctcaaacctctggcttttaggggtctccagtcgctctcgtgctacccccgtttcggggttctatccaggctgggcatccgcccaatggataccaaggagaatgggactcactagggaaggaaggcagagcctggactgcttagaggtggactctgcctatacagaacgtttagtctttaacgaggacatggtatttttgggcggcgttgggggcagaggcggagagggtagcgtaatagactatcacggccttttgaagaagtcatatgtcattgtgaactttttttctctttaaaagcaaagaaaaactttaaaaaaacacaagaaataaatccttttgttttacaagcaggctgtggccaggactttggatattccataagttaacttaaaatcagggaaggataggtgctctatccttcagcagtgctatagctttgcccactcgtgtgatttttttttgtcgtctactagttccttaaaagccaattaaatcaagattttcagcatttcttcccattacatgccttttcttaattaatggcattaaacgtgtttaggcagcaatttttcttttcggtcaaaaagtagaaaaagacatattgagtgtaggggaagagcctttcacgtgcactaaaacaatgcgggcctgaaagtaatggttaagaaagcaatcattcattatttctagttctttatgtgctagttatcaaaagcgaacgaccaggggcgcctgcgcggcttgtgactggcgcaagcagaactcctctgctcttagccgtttcctgctcacctacgaggaccccatcctaccgtaggcttctccacctgtcctcagaatgcattccccatgtctaggaaacctggggtagggactgggggaaggagacattttgcgtctctctggctcccagcacaataagaaatgtcagcctcggcttggcgactgcgagcccgccccgcgcgaagcgagattggggagctcctctagtctggccggagccagggctgagcccgcgcaaagcattctccccagaagtcatcgctgctcttgatttttaaccatatcccaaacatactacggtctaataatttatttttactaccgattatcaaacagaagaagaatttaacacaatctaaatgacagaaatcacgcgacgttatctctgcattgcccccatttaaccccatggggttaatcccggacaagtgagcgtttaactggcccagcagggcgactggcggtgtagtgcagtgtccgggcgtgaagcactggatcgctttagacgcttcatttcaacaaatgatcattttctctcagattcacggggaaactccaatgcaagacctttgttttcttcttagtaatacggtttgtttttttgaccggggtcccaaatcgcccccctccatcccatattacatttgtattcttacactttaatccggaaagagggggttaggggccgagggctgtgggggggggggggctttatctgctcacattatcaaaggtcaatagcctcctaaggctaggcacttatttactacggagccaggaaaatagaggaacagtaaatttgaggggtttttttccatgtatttgaaaagaaaggcatcttccctcctccatcccttacacccccccctccgccccatagaacaagtttcaattcaggaaaggcctgtggcgtaggttggagactttttaactttttacataagcctgtagacctcctctggcaatgtccctcgattcctccagagtgaaaccagccaatcaagcaacgacatcgccaaaacccaaggcctggcaaccagtacttcaggcaggttcgcgtcgacaggggcaaacctccattctaccctgggctgctaagcacagtggctgccctccagctcttcagggatgttgtcggccccccgcccctcccccaaccagccaaagcaaaccttcgccaactcaagtttcccttgcttgcctcccgcgatgaaccgcgcacccacaagtctgggtggggcgtggctgagagcctgagtgactgagtgggccctggtggtgctgcgcgcagcgggatataacgagcgacagaggtcgctgttggaccacttttccacgccagcctagacgccgaggtttgctggagcgtgcgcaggggatcagaccacagggagcgagcgagagggagagagaggtgttgggtctcaggagtgcagtataatttggggaaaggaattaacgtccctgggacggctgcttcccgtcccacccagaggcggagtgtctaagttcaagcagcaggcgcgtcaggtctggcggcctcgccttcttgcgcttcgcccgaggcccagagtcccggaggcgggtgcccagcgcgcggcctgcgcttccctcccggccttaccattggcgccaggatgctgccgcgggaagaacttgctgctggctgcctcttttcggctctcaggagagtccgtgaactcgacctttttgatttcggagtctttggagaagagacattcaacggccgccggctgcacgcctgggccacgcgcgcgcccgccccacgtgcggagagaggcgtcccggaccgcggccgaaaggagccggggacgggaggagggggaggggcgaggcaggccggaggagaaagagggacaaagagcaaagacccagttagaggaaagagctgacggcatccccgtcccccggaccctctggcaacccggggcaggatggcgtactctttctgcgcctccccggttgccggcggttccagccgggaggagtaggctggggggcttcggtacacagcgcgccgctgcttcctagtccaccgccccgccacagggagaggccactggcgatttggttctgatttccttcctgcccaggctggcccctcggggaagcgcccctcgctggggcctcgccgcagggccagtgccctcttgccgccctcacgtggcgcggcctcccgtccgatgacccgggcaggagaagggggttcttacctaattgcacacacgccgacaccagtttgcggcagttggtctccattccccgttatctgcaaaacagaagagaaggaaggctgtaagaagcggcggccgtcgagtgagcagggctcagatgagactacgttacactagctgttaggcgcctactgtgtgctaggcttcaggcgtgtttttccgacctgacagcctctggctgtgcagcagcatctccagcctagcctcgggcccaggacatttatttatcaagaggggatctccctccagagttgccgcaaaagtgcccagaggttagaggactataaagccacagtgtgctggggaggctgtggacctactttcaagaatctcggtgccggggttaagaactcatctgaacgcaatggcagcgggagtgggtgggtggagaggacttttctctttgggaagctgtatgcaaagaccacccttcagtgcttgtccattagttggagctcggtaaacatttgtagaacatcagcgccaacgtgcccctgtcctagacagcagtttccctcggttttctgtaattctgaaacgaacgggctcttggcctagggtgtttcaggagcgagctgagttcgggcctctcatccatcaggagccacttttccatatttagccacactttctcctagagatactaacccggccatttatttacttactacaaataattaccctaaagtatgatttaagatcgcagaggagagacactgggtggactgagcgagactgaggagagcagggcaaacgttcttggagggtttactgcccgccaaggacggagaaatagctctggtataactgctacccagttctccccctttctctcccgggcgagccaaatctttttcacgttttcaaccacaacgcagcgagccaagcatttaacgcgctcccccttctctgccacaggcaagccgggagaggtgggtctcgaggggctccaccgggtgggtagaagagccgcggttgctttaaagacaagaaaagaaggtccagggctccctaggccccttcgatctcagcgcctgcctctctccacgctaaccagggtacgccgacgaccggagggcccacttcgcgcgggtgcggggatcggggtgggagcaagcgttgtcgggttggcggaggcacagaggcggggcagggagctgcgggcctgcctctggcctgagtaccgtttccctgcgtctcggcctctcctgaagggagctgggccctggggagcctctggccaaggtcgctgcctacaggaggggctgcccggcgctgtggcgtggggatccagggtggggacggccaggcggttcccccacccgctagcgagaacgcgggcggggactctgccgattcgatccttgtgggcccgtgggcccagaagtagcagtttggcggctccagatttagtgattctgcagtaaaatcacaggattagtccctgattgagatgtctgttcgtgagatattacaaaattcattatcacagctttctactaactcgatatgaagtaacacagatgggattttattagtccagacttcaaatgtttacttatgataatttcggaggaaatttgcatgtcatcatcatttcgataatcttttttttttatatgtctgaactggctgcattattagctggtagccggagcactgcagatggtaactgcaaatagtttttatttatttattttttttaaagaatgaaatatacaaaagaaaaagattgcgttgcttggtgtaaagtcagtcaattattacacattcttccccccacttccccgtgcttcagtgctgaagaccaaacaaagcaatacaaaacaaatcttcaagaactcatagagctccactctaaggactgaaaagaaggtcaaggcgtgttccttagctcactcctacatgtccttgtgacttggagatttattttgcagtcaaaatgagccttgagacttgcatttttatgcttcatttaatgaccaggcctactagaagaactgagtctaaataactggggaagataattttttaaaaagagacctccaattcccgcctgctgatccttaaacttgccctatcaagacaagtcttctgtgagaaatttggctgccagacttcggaactggcttcaatggctaatctcacaaattgagatgggagacttttcctgatgggaggtagttctcacccccaaagttcatgttctagttggaatgtatatgccaaggactcttgttttggccaacttgggttttatattgtgagcacacaaaaagcactacacggctaacggaggacgaggaaccatggcaaagcaggcaggcaagccctaagaaataaaacaatttgctaaaaaataatttctgatgactaccgcaagactgaaagtgcaggaaaaatacagttcgaataatcccagatcctttcacatttccccccttttcatacactttgttaccccataacaaaatctttaatggaaagtttaaaaataaacagcacaggaacatgtgttttaaatgaactaaattgtgaaattagccagtaaattaatttgtagtaagtaattatttaaggaaattaaaatactgctcagttcagttctgtattttaccatgtgtatgcgttctttacaaccaattaatataagtgctttaggaacatttgaagacaaacacgcttaacttaaggaacaaagcacctaaataatttaagtgtaattttgctgagttaaagtaaaacattccacaaatgaagtggctatttaattttttagggaaagtttggttattgaaatgttgtatgctcatgttacatcaacaaaaatcttcaatttattttgcttatgtgctttgttttcttgatattattggtatttgaattttagatggatttctgccaaaatgatattttgtgtgataaaagcatctttagttttgattgatagactaaaacaaatgcaaggaaatttctttaaatcagattaatttttcataaaaatattttagaatgtatgaattctgatatttacatttataatggtaaaagttttttccgtttagtttagtaagacaatactcacacaaaagagtaaaaaaaaatcacaccaccttatgatagtttgatttctaaattgcttaagaaagtaaagtggttaaactggaaaagaggaacatatttcggaggtttagaatcgaaaatttttttcttaatctccagctggaaaataattctctgcatccatttaaagtgtatctcctgaagtgccagattggagttgactggtgatcaatttaaaggagttacaatccaaagaaatggtgagagcttggcatccaggcctggctcccaggtaattcgcttgggcctgagaggtcactaactgccagttaagatggaatctttttcttttcttttttttcccaatggataacaatgggaagggggctaatcttccagtagctgaaactttgtacccagccctttatcttgagaatgctaatccttggcccgaggatttgttcctgcagtgttggcaccgagatttaagggaagatacctcgttttaaatgccagccacggtctggcttccctctcgacttcagcaccctgtagattgttagtgtctgtggcgggggacgaaaggaacagggctttgcaaggtctgtttgccgactgcgttaccttgggcgaaacttagccccaaaagccacaaatcacctacggtgaagattctccgaagtggaacaaatttccagactcgcattatctcacatccctgcgggatagatggcctccacttaccggctaccgggagagagctgctgtctccgcgtcccactgcttcccggggcgatttccagcgagccgagcctccggctgcacggcaagcgcccgaaagccgggcctgagaggactgcagggctcctgagggtgccaagttccgaaggagtccacgggtgcactggggcctccgaaatctagccgccactggcagtttctttctgctcctctccagctttctcgctcggtctcgcactctctctcctctccctccctctcatccctctctcttccctctgctcctactccgtgtggggagtgacgtgacgtcagcagagattccaccaaactccactgcacagtggcgcgcgggcggccggccgagcccggctgcgcggctggcgatccaggagcgagcacagcgcccgggcgagcgccggggggagcgagcaggggcgacgagaaacgaggcaggggagggaagcagatgccagcgggccgaagagtcgggagccggagccgggagagcgaaaggagaggggacctggcggggcacttaggagccaaccgaggagcaggagcacggactcccactgtggaaaggaggaccagaagggaggatgggatggaagagaagaaaaagcaatctgcgccaacccggcagccctaataaatcaaagggggagcgccagggcagcggggagacagaaacgtacttttggggagcaaatcaggacgggctgggaggaagcgacagggaaagtggcccaagagacggaacaaaggacaatgttcatggggttgtttgggacgaggcgtgtggagtgtgggtgtgagcgtgcgtgtgtgaccttctttcaggcctgcagagttgaggaaagaggtcacagcaaagagggactgcggagggaggaaagtgagagaccggtagagggcgggagtggaggtgggcgcggtggggatgggagaggatgagtgaagagaaatctagaagaatggagtgagctagtgggagagggtgggagggccacagccgggagcgaacgagctaggcttgtcagctggggaaggccgggacgctgggcccagcttagctgggacaccgcgcccgaggtcaaggcgggtggaccaggcatgctgagagtgtcggcgcacaggtgggcacggccacgcactgacccagtgttcacgaagggtttgcactggacaaggctcagacgctcatagagtctagaatttcctctgctgtacctacattcaacaagttcaccctgggtcacggatatctcattttttaaaatgacgaggttaaggttcctggcgaggatggtattaaattgcacgggatagaagtgggggtgggggagagagtttccctcaagtccacatttgctcctgcaaagcaaagagtatgtgaaattacagggcatattctcactcgaaaagtgtgccttacttctgaaccctgattttctgatttcttgacttgagcaaagatgtgtattttggtagtgagcagaatattttggctctgtcctgcctctgagtggaaggactataaatataattcgcctggaggaccaggtgtgaaggcttctgccaggcatatgggacaatgttttttcaatctcaagggcatcctgttaatgtatgtttttggaaagtgccggaacacagccattgctcctggattcggattttcccaccaatattaattcctgcttgagagcaaaactcaggcccgctattaaaaagacatctctttggtccctaattgagaataaagttccctctaaaagttgtattgctcttcctaaatcaatataccaatactcgcaattttagaaatatatagtgactcgggagaatgtgcataaaatagatacgtttaaaaaagcttggcgcttaaaactaaccctagtcactatataggtgctgggctttccctacttttgggggctgtctggaacatgttatgtgttttcttgaattactccgtgttttgaattcatttgagttagcagtaaaaacaggcaaacaaacttgctcaatttgttttgagtgctaaatcccttcactttgaaatagctaacagtcgacagatggactcattttatggaaagggttagcctcttcagccacgaagaaaactgattagagatctacattttaagccatttctaacctccacgtaacatccgtgaaaactcaaactttctctctttacccagtggaaactcaaagcagtgttatttaaggggagagaaatgagggggaaaatgcccacgtgctgtttaattgtatttcctctctgactctgagaatttctatttctggtttttgaaatctcgccgaggcaagaaaatcaaatttcttcaacaagtcccacaactgaactctagttacaggacaccggaaagtgcagtccgagaaagacatcttcacctctgcccatcgacgatttttgcagcctccccattcctctgagtaatgggctaataatcctccctttttttcttttcattttgtagagattaagaggcgctcgtagcagaacggccttgccttcagctggtggcgaggataggcaatctcatggaaaagttggaagagaatgagaaaaccaaagacagaaagattcagagatccgcggagagacacagggagagggaagggagttgcgctgaaaagacgcaaagatacgcgcgtgcaactccctcccctttcaggtttcagaggtttgcaaaccagggctgagaggaaggggctcgggaagctcacgttcctctcgccccccttctgtctggagtctcgcccgccagaggctggttaaccccagtcccggccgccgcagacactgcgctgagcttttgggtcctcgccttgcccagcgccagtgcagctgaagtgagcagctggtgggaaatgcaaatggctcctggagaaatagaagatacagaatgattctcattccctcctcgagtgtgtggaaggagctggacatacgtttcacgctcctaatccttcttttacatttttagtcatactcctattaaacaactaattaatgcccagaatcaccagggaatacattaggcatgcaatcgtagaagcagggtgctggggggctacaaaccaccgagctgatttaagacgtggatttcaggtttttcccttgtcaaagcagtaaaggaagagcgggccttggcgactgtatttagattccgattacttcaaattagaagggggtggagggagcgtccaagcaaagcaagcaattctctgccctgcagatgtaaacaagattgtagcatcaaaggtactagctcctttagggctagatcgcctggactgggagcctggggaaggggagacactaaccttacgtatctgtgaatttcaaggatgttacatttttacataaacaactccagtgcggattctctggaatggggggagtaatacccccattctagaatattaaaacattttccccccaaagcgtatatcctttttatttcctcaaaattttgaactatgtctaaagataatagtcttccagtaaactggagcattggaccatttccttcaccctttcctaccgacattttgatgatctgattttaatgtgtggggggcacagggaattaaatacagcccataaaactaagcttagatgaaacagtgctggctaagtgggttcagataatttttaatgagaatctcaattacactcctccccccaatatgttgagacaagtgacagaaccgttagaatggtaatcaaattggaaagctcagggagaacaacaatttcgtgatcaaattggggcaaaaccgtggacaaatgtggggtgacctccgccaactccctgtcacccaagagtcaggatttgggaaaggtacagtattatttcagagcccgctgtgacgggctgtgtgctaccatttactttcttcactctggattatgatctcaaccctggcaagcaatttccccagctccttatctgacaacaagcgagtatgtaaataccaatggctagcgatgtttaactgcctcaaacattattgatttgttggctgttctaaattgtcttcctagtccaggtcttgtttccgaattgtctattctagaggtttgatccatgcctccgatgctacaatacaataattgtttttttaaaaaaggcatttaagatgaaccaattgatttgcatataaattaaaattactatgcgttgccgattccggtgttttataatcatttcgaaattagtacttaaccacttgagctaaaagaatatataaatgcctgtattgactcactaatgaattacccaattaaaacgtccgggcaatgctgggcgctggaaagattgttaaatcaagacatattacaggagggatatgaagattagaaaggtaacagaccaatatctcgcactcaaaacggagtttccggtgattcccagctttaattttggagcaggggtctttctcctctgctgttaaaaagattttgtgcttgtttgtgagtgagtgcattcaagtggaaggaacgctcccacggctacggtggctcaggccctttgctcggaccgggaccttacagttctaacccaggagcgttaaactctggaagactccgggccagccctggaggtgcgtggccccgcaagtcgccaggccaagcttgctttttctgtctgcccctccggcaggctgggcgcgctatggcagtgagctttccgcgcaaacggagagctggaaccaaagctgacatttaatagatatgctaactgagcacttaccttcgtcctgagaataggaataaaaggtagctcttcttaagagaggcggtgcaaaggcacgctataggagttcagaaaaggctggcggcgggaaatctgtagcctgggggctagtcaacatcccctttcatttcaagcacttattgatttgctgttgtcatctttggcgacgcagaaggacacttgaaagaatttctgatggggctctgatctgagaaaggaggtgacctgcccaggctcccaccaaattcttaattaccacatcaactgcttttttttatcccccacccgacctccttccttttgcttattcttaactttttaattattcagaaactcccttacctctcagtggcttcccttctgcagcagttttctattcgaaccttttccccgcctttccgtggtagggcctgtatattgatccctctgacctttggcacatctgggccctctgaaatctctcaatcttttcagatttgaggatggcaggctccaccctctccactgtgtgcacacactcagagatatgaaaacttacacagactgccttcaaacccagggtatctaacagatgttccctttccagttcgtctcttgatctgaaatgcctgcctgattccaacttggataccactctttcttgcccttcctttttcaaagcagtttggacatgtgtgcaagtgagcccagaacagctccacccatattctttaccaaactgtaaataaaagaagaactaatgaagtagattggcatatagattgcatcaagagcccgaatccccagtttctggattccccattcaactctggctgtcatctacattgacagagtcattctaagcagaggcccagagaaacctgcattgtgggacaacaggtaaagccacagtaaaaagtggaataattttaaagtcattttattagaatgtaaattgtatttctgggttttgttcgtaaccacctagttttaatatatacagagttagacaggaaaaaataggtcaacacagttattggtactagagaagacaaattccatgggctcctcagtgaaaagaagatccccaaagtctataatttttgatcatttaatttcatttataattgtgggaatgaataagacaccaactgctttatgtatttcatttacatcaaccaatttgtgtttccatcaaaagcagttatacagaatttcttttaacttctggtagcaagttcagaaaatgaagcttacagccaccctgaactggatacatctcttgagctgaccatttctgtaagtgcaggaatataatattgttcttctatggtctttttgcactcttttagggtttgcaagtccttatcaggtctgacatcactgtttgggtctacattcattacaagcaaatttgattactatgctgattttaaaacagcctatttggccagcataatcttagttttcaaattataaaaaccttttaatatacgaagttcccagtttttacctcctctagctccttgctcattcaaaacttctattttaattggtgtaagtaataataatttgtattactatttgtactccttttacttttttggagattgggctggattccagagagaacaccagcatcaccaccaccacaaacaacaaaatctaaaagtaaagcccttatttgcatgataattggtacttggaatgcttctgacttactcaatgccaccttataaaggtaccttgtaaactttcttggaatttctagcaagagcttgtagtaactggaacaactctctgggaagatatcctctttgatgggctttcagtttctggaggaatagattgagagcaattagggagggaggggacattggaaattggcagctacgtcagctgaaacaagcctgggttcagtaaggtgactgatgttgtggttgattccctaccccgagtttctctttaattggggcactgactcttcccactttgggatcccaaggcactcggtgtgtatgcagattcctcccttgtggtcttcaccatgtggtttcgtagcaggtctctggttcaatgatattttatagtcatagccctcatattcattatcatgatctcaatgtttaggcttttagtgtatttatattaaacctgctttattagtaagctggagcacacaggagagatgggggcaagtaaggactcagcagagctcaaattcagacatgtttaaatggctttgactgtgtaaagtgtggcaatgcttcctgctgccctagctttccactctaagcttcacatgtcctctggctaatgaagtgtgatataggccacatgctaggaataatagtatttgttgagaacaaagtgaactcaggaaacctggtatacacaaaatgcatc

SEQ ID NO: 150 - DNA, 8252 bp, Homo Sapiens
gccatcgtggctgggccataggctcactgctctgtggtagatggaagatatgggccttggtaatatactgaaatgccacaggaaaccaaaccagaagtgatttaacccacaagcacacttaggtttatttaacatgatgtctcaaggtgggtggggggctcaaatcagtagctcagggttattaaggctctaggtcttgggccttacctcattattacataatggctgcctgcaacaccacatcacacccaccttccacaacacccaaaggcaggctgcaagggctggcctaggaagccagagggcgctcttcattcatcaagggagaagcctgccccaccttcaaggagatgccccctatgtctcatgggccacatagaattgcacggccacttctggctaaaagaggggctgggaaagtgaattctttctcccccttccttcgtagagtgcaagttaggtaagaaagaacggatggtggacagccaggaaacagtcagctacgagatgttgtgtggaaagcccacctttctgacactggagaactgtgggaagaacggacaggccacacaccagctgggctctgagaacccccagcttctgctccacagtgagccagcaggaatccaaagggcatgggcagaccccaggggctccttcaccccacccaggggtagagagggcaagacggagtagagcgaggtaagagactgagcaatgcgttcccaaagactgtgactgacagaagctgtgcaaattattatgacaaactgaattttaagaggaattggactaaataaagttagctcatttttacctgtaattagcagacagagagtgtaagatcagacataccatagatggaaaagaaaagctaaaacttccttgcacatctgagaggtaagaggaggtgtctgtggcccccctgacacatacgtgacatatgtattattacggctcatgtgtgtgctgctgtgtgcagggggcagggggcttcccgttcctgatggttcttcttggtgggtgtctcccggcctctcaggcctctttatctgctgaacgtggtagccaagggtttgggaatgatttgccagactggttaatgtggaaagagctggccccgctcagttctgcacctccctcttcctccctggaaccgtctggctgcagagagcaggagctttccagagctcccgggggatcccatctccagtataactgtgcaacgtgtgcccagcacaagagcaccagatggagggacaggtgggaggaggaggaacccagggtgcatttagcttggggcttgctgagctgaggtccccagagcaaggacgactaggttggggggacaccctctcccaatccttgccaagctacagaggggccagtgggaataaagtgacattttggcttctgtatccctcctctgctgttctattttctagttcgttcagatctgaggttggggaggggttttcctggaggggtcagtccatgccaccctctgcaatttttattacacatgctttcagacattctgctacaggtttcatctcctacgccaatttctatttgggaaagcaaataaacggaaagctaacttgtgtcacttggtcgctggggcatccgcagtgagtagttaagaaatgccaggggagtcggtgtccattttcatgcctggacaagagtgcgtcttggacttgcgtcctgctgcacaccccaccgtcccgctgcacaccccaccgtcctactgcacaccccactgtcctactgtacaccccaccgtcctactgcacaccccactgtcctactgcacaccccactgtcctactgtacaccccaccatccctgctttctgcactcagctgcccacttgtatcccagctcaggaagcccagaagatgcagaacctctgcgagagcccagggtgaaacgctgcgcttcactttcaaagaaaggaaaatcattcatattctttaaaagaatgaacagcacagattaatatcgatctcttttaatttttaggccaattttgagtagtcaaagtcagagcagtcaatctgtgttgtgagccgaggcacagctgcagaagcgtgtctgaggtgtccggtggaggtggcagccgagctctgggactaatcaccgtgctggggacggcaccgcgtcaggatgcaggcagatccctgcagaagtgtctaaaattcacactcctctacaggggtgagggggagggagaaagagatgctttagtgaggataaacattttctttcacatttaaacaattacagagtttttactttaaagtatccataggcacattctttagaaaacatgaactgtcagccgggcacggtggctcacgcctgtaatcccagctctctgggaggctgaggcgggcagatcacctgaggtcaagagttcaagaccggtctggccaacatggtgaaaccccgtctatactaaaaatacaaaaaaaatttagctgggcgtagtggcacacacctgtaatctcagctactaggaagctgaggttgaactcaggaggcagagattgcagtgagccaagatcgcaccattgcactccagctcaggggcaacggagcgagactccatttcaaaaaaaaaaaaaaaaaaagaatacatgaaatgtcttcagatttcgtcatgccttccccctctatcctaggcaagctagaaagcgttaccaacagtggctcttcccaggcttttggttagagatgtgaagagaagccggggggaaatcaggtttcttcccaagtcccttagccctgcctttctattcctggacctgaatgcagcctgactcaggctaccccattgcaccaccactggcggccgtgactctgtgtaaaggcatagctggtgatgctgatcagagcctctgtagtcttaaatgacttttctaactaattctaaatcttcagaacccatcgtataaaaaggccataccttctggagggacgtcgatggtattaggatagaagcaccaggggaccccacgaacggtgtcgtcgaaacagcagcccttatttgcacactgggagggcgtgacaccaggaaaaccacaattctgtctttcacggggggccactgtacacgtctctgaaagtgcacaggtaagaagcaaagtaagttgtgggctgaattccttgatgttatcatgcacacacccatccagcttccttctccaatgacatcagcaactgtccagtgaggcggatataaaaccctcaggacatgagagggagacgtggtcctcacatcctgatgtgcaaacattacgctcagggaaaatgcaaggtgccccaggtttgtggactttgcatctttctaggtaacttatttattcactttttaatttcaacaaatgattattaaattttactcaatacataaatatttactgagcaccatttgtgtgcatgagaagtgggagctagcatggcaaaagccaggcactgtgccaggtgagagagacccagaaattaaaaccagagaagtcattaataagagtctaaatatctgggcccaggctcatgcctgtaatcccagcactttgggaggctgaaggaggtgaatcacttgaggtcaggagttcaagaccagcctgaccaaaatggtgaagccccatctctactaaaaatacaaaaaattaggcgggcattgtggcacacgtctgtaatcccagctacttgggaggctgaggcaggagaatcacttgaacccaggaggcagaggttgtagtgagccaagatcgcaccattgcactccagcctgagtgacagagcaagactccatctcaaaaaaaaaaaaaaaagagtctaaggatctgatggaggagaaaggcaagaacatgtgcgagacaacgcaaggccatcgtcccagggtgcccagggtaaccacgggggtagggcactccccggagaggccaatgacaagcaggttgaacaaagcaggggggctccctgcaggaggaggttcaccaggtgaagatggagccgcatgggcaaaggccattccagagacccaggtgtgttcaggaggtggaaacccattgcaggtaaggtgagaggaccgggtggggtggtctaggaggagccgacagagggtacaagctgtgaaacagcttgaagcagggcagtgaggaaagggatctagaggaggaagacacgtggacagatggggctggctgggggctgccgcaggatcttatgcaagaggttctaacaccagagcttcaggctctgagctccgcggaatcaaaggtctcagaaagcaacctattaggatctggtggttgacagcctgcagcagggggtgaaagaggagcccagagcaccctccggtccctgtccctgccttggggcataggaggggaggaactcagtctggccacactggctcaggtgagggcgccccaggggaggccgagaggggctgttctcttgtctgctttgctatcagggactgcctcgagatgtctttggagaaagtgttcctggcttgctgggaaggatccgtgttcagctcccgctgcccagcagcttccatgggaaccttgccctcctggggtctggatccatcgcgacgtgaaggtgatcatcgcccacccccgggacactgtgggggtcaagagaggccccgtggtgagggaggatcatcatcctgggggtcgggggggtttcctcctcagggaggaagatttccagccccggtgctctgcctccggcagactctgtcttgcccacccgctttgtctttgtcgcatgatggaaataaatggaaatggtttccacacacgaatgcactaaactgtaatcacaattttctagatttcagttgtaacaggatcatggacctgagtgacccgcaaagacgctctgagccttgagccagagggtgtgtggggtggggaggggagtttgccacggcctctgtgatcccacagcacagggggcagagctgggggctggggtgggggcaagggcgcaggcagatgggcctgggggtggccagcacggggacccacccagttcgttctgtacaccgaggccacttcctctctcgggttccaaagctcccccgctccctgccatgggcttgggggtcttcccactgcagcccaatgctggctgctcttctacgctgcccaagcccacccctcaggcccggtaccccacagcagagatcaagaggtggctggagggcagtgggggcacggacagcaccactgggcgctccctcttcaggcctctctggaaacccttgctttggaaacgtagaaagccctttctcctgcccccaccttgaaactgtacctaataacggcaaataagttattcagctccccacagctggcaaagtgcaagtcgcagatgctgccacacagcatttcctgacagccctagggcagaccgttgatccattctgcaggtaaaggagttgagatgcaaacacttcccaaggaagcaagaatggcctcctcctccactccctagaaggacccagggcaaccgatccacttgacaacaccagggaatatgggttgccagccacgcactcatgagagaggtggctttgactcccagagcatggatcccaggggagcccaggaacctgtaggagagggtctcccagttggccaccactgggacgggcattcgggcctgtgggagagggtctcccaggtggccatcactgggaccggcatttgggcctatctggatgggccttgggagggtctgcccctgggggagatgttggcatgaacagtcaaaagcactattctgagaccccacgccaacacttcctctttgaaacatgacacttgggaggattgtatagtcttcctaacacaggaaaacagccccgactgaaggcagccccctcctcgtcgcacttctcgaaggtctccgggggccctgccaccctgagttactctccacctgcttttgccgatcctgtaaattggatatacttttaagggcctagaacagcacctggcacaaaacaggtgctcaaaaatatgtatgtaaaacagtggctcctggcggaggctgccagagctggctgtggccccacagagcaggaagaagcacgccttacctgtctgggcctcggccagggtgccgagggccagcatggacaccaggaccagggcgcagatcaccttgttctccatggtggccattgcctcctctctgctccaaaggcgaccccgagtcagggatgagaggccgcccgagccccggattttatagggcaggctctgtttgcttaaagagcgttagataacatttgcctaaggaggcccggggatcctctgagacaataatctccactgatttttatcaaaggtgtttcctagacatggtcaagctacatggaaggatttgctgatagacagagacgacatgtggtgaggtcatcttggctgagggatctgagattcagaaagtccctctttcccatgggagtctcctccaacctgaccttaatccaggtcctactcatatctgagaggccctcccgccagggtaaatactgtactcactgcagaagtgattcatagtgagagatggccggaaaaaggcttggccgtgacaacagtggctcacggggtggccaccgtgaccttgcagggggaagggaaggagctcatgaagcccattccgtctaggcctaagctaattcttttacagtggaattgttttaataatgaaattgtaggcctggcgcagtggctcacgcctgtaatcccaacactttgggaggccaaagcaggcggatcacttaaagtcaggagtttgagactagcctggccaacatggcgaaaccccgtctctacaaaaaaaaaaaatacaaaaattagccaggcatggtggcgggtgcctgtaatcctagctactctggaggttaagtcaggagaatcacttgaacctgggaggcggaggttgcagtgagtcgagatcaccctactgcactccagcctgagcgacagattaagtctccttctgggaggggctgggggcaggagggagaaaaaaatagtatatacgagctgccatcaaaaactgacaaagtgaacgtggttcactcccctgtgtctatggggctccctccctccccctcccacaccttcccagttggtcccctggactcctgtattttagaggacagcctcctgctctcctgtaccatgcctcactcccctcccctgctcggagctttctctttcatagctcttattacctcctggtggataaaacaagtgactgacacattatgttggttatttattcattgcactcctccctgcagcagacgggagggcgcatgggagcagaagtcctcatctcctagtgccttgaggtggccccagaccctagaacagtggctttgattggcattcgagaaacagctgttgaagagctgcatgaagaaatggacaacaggagaaatcttttcttcttcagtgagaaattaggccctgaggaaaatgcatgctagcctaacaaaggtactatcttttcttgggtgacctagtcagtacatttctgcagcccctctgggaggggagcctgggccagaatgggggcggccatgttcctcttcgctccatcccaggacccagcccctcctccagggctgccactcctgcaccggggtctccactcctgggccagggtctccaggaggggcctgaccgcaggacccagggaggggccgaggcctggtgtcctctgtggtcagcttaagtttattgaaaacaggacgggggcaccaggcccagggtggtgctcatagtgacggtggttttcgctgctctaatttctcggatcaaaatgggggctcttggaaatgggatgtaaattgcacaatcatttggagaaaaggtgggcagtgttcggtgaggtttaagccatacagattttacagctcagcaaattcttctgtttccaggcctggtctcttaatcccagaaacatgttcatacttgggcagaagaaaacacaggcaaagatattctttttagcattgtttgtaacagctggaaacagggaaagaaggaaggaaggaaaggagggaaagaaaagcaaaataaatattcattaaccagggaaagggaaaatgaacttaaaatacaatgcagtcgtcccttagtacccctgggggactggtttcaggaccccccacccagggatgccaaaatccacaaatgctcaagtcc

SEQ ID NO: 151 - DNA, 28536 bp, Artificial Sequence
  chemically treated genomic DNA (Homo sapiens)
gttttgggagttaggtttttttcgttggatgggaaaaggaggtgcggaaaggggtaggcggtttgcgggttagcggggatgagagttgtggggagaacggaggagagagtaaaattattttttttggaagtttaagggaagggagttgaggtgagagaaatggttttttttaggttttaagttttcgtttttagtttgtattatttaagtcggggaagtgataattttttttaaatttcgatttttattttttgttttttgtagattgattgatgttttcgcgttgttttagtttagtaattaaattaggtcgaggtatattttttttatttagagtttttaaattatttattaatttgtaggagatttaaatttttcgggtaggtttcgttagcgtttttagtttttatttttaaatttttttttttagttttttttttttttttcgttttttggtttttttcgttttttattaggttgagaggcggagaggtcgggatcgttgggttttgcggttttagaagttaaagttcgttcgtggggatcgtttttttttttattgtttttaagtgaataatatggtgggaggtgattttcgtttaaagggtttttatttgttttttattgttgcgtgattttttcgtaagtcggaggtagagttttaaaaagaaagaaagtgtgcgttgagtattgattttaaatcggggatattatttgcgatttttttaagtggtagtagtagttttttgtagaataaagatttagtgttcgagttttaaaagtttttaggtaaagttttatttagatgaaagtaattaaggcgaaaaaataatgatattgtcggttttagaaaatcggcggttattttttgttttaagttttttagcgtggtgtttgttttcgtttattttggttgtgcggggggttgataagtataataaaagattttagtatatttttttttttatttttataacgatttttttagcgttatgaggatgaattttttgggattaagtggtatttgtttttatttgttatgaaattaaattttatatttttttaaagttgaaaatcgcggataaagaaggatcgggtgtttaaagtttatttaaatatttatatcgaatttattttttgtttagatgttagaggatggtagggagggttagggttgtaatttattttgatttgttttattgttttgtagtttgtaaattataattttgtataattttaggaataagtaggtttagaattaatgggttaatattatttaaaataaaatatcgggagtatgatttttgttttaattatatattgttcgataagatttaggaaattttattttaattttttaatttttgagttttttgagaaattgaagggttgtagttattagaaattatttttgttttttttaatgtttttaaaggatttggaaatagtaatgtaatataatatgaaggatttttttatttaagtttgaagataaacgtggaagtttaaatattttgaattggagatgtttttttgtaaatttattatagatgtattttttttgagagaaatgtatataaattatatatgtatatatgtataaatatttttttagaataatttgttagaggtgtaggttttttcgtaaaggagtaaatttgagagttattttaagttgatggatttgttaaattttttttttttttttttttttttatattatttgttagttataatggaattttttaggtttaagttaaagaaaaattggagagataaaattagattttgtagtttttttttttttcgggaatgtttttttttttttttttagtttttgatgaatggttattatttatttttattaaatttaaataaggattgttgttttgtatgtttaattaggtaggtagagggaattggtttgtttaggaagtagtgattgagatgttttggttaagttagtgatagaggaggggagaaagaatttagattaatttgtatgtagtatattttatttttatgaaataaaatatatttgttttatatttgttgaaaagtaaaataataatattgtacgaaatgttatatatagggtaggttgtatatagtagttttagaaatattattgtatttattagagaaattattttaaaattgatatttatatattttttataataataataatatgttagaaatatatagtgtggtatttagtatatatatttttttgttcgtaagcgaaaaattttaatcgtttttgtataatatgttttattttaaagtttaatttttaaaaatattgttgtgatattattaataattgtttttataaaattaatttgatatttcgatatatatatatttttttagttatttaaatgttaataatgttaaatttaaaaaataataagtttatagtaatgttaaaatgttatatttagttaaatatttgtttgtgtatgtgtttttgtaattgttagaaatatttgtagtgaaagatgttagatattgaggatatttttttgaaattaaaggagttttttttttgatttagtggtttttttttttttatatagtttttttttttttttttttttttagtgtttacgattttttagtataatttttagttttttaagggcggagttgttttattcggtaaggttttaggatttcggcgttgtgggtgcggtttatacgggtcggtttattgtatattggtaagtatttaggttggaggtcgggttttgtacgttggcgtagtcgaagttggagtgttgttttgtttttagttttaggttggttaggttcgagttatacgtgtttttataaatatacggaggagtcggcggcgcgtaaggataggtaggcgtcggtatcgcggaatttagcgacgggttatttaggttgtttaagttatttaggttgttgagattggagttcgggacgtttgttattgttgagggtattatgttggacgatatgtttatggacgagatagagttgggtggggaaaatatgttttgtgatgatagggggttgacgtttatagagttgaagaaggggaagtttttggtggatagggaggcggatgtaaggtttttggcggtttagttgttgtaggaatagtttgggtatatgtcgtcgtagggttgtatgagtttattgaattgcggttcgaagttatttttgtatagttcggtttgttggttgcgttttttttttttttatttggttcgacgatttttgaattaaatttgggggcggttggggtaagggagtaaatagatgttatagtgtagattattaaaatttttatcggaggttaattttcgttttttttcgatatatacgttagcgtatttatatattttggtttcgttttattgtatcgttttgtatattaagatattagggttagtttttagttattggttcgggtttttattaagcgtaggagatttggtttgttttggtttgcgagttgggattcggagttacgttataaattttagtcgaacgtatggagatttgcggacggtttgattatttagttaggcgtttttttaggtttaaaaatatttaatgtaaaataaacgcggggtagtaggtttttttaatttttttcggggtattttgtaaatttgtttttattttaaagttatagatttacggatgaggagaaggggttggaagggtattagaggatcgtttttttttttacgtaattttttttttttttttttgatttttattgtcgttttttattttttggtacgtgtttttttaatagggattaggtcgttaatattttttttcgtttagtaaaataattaaataaagagtaaaagattattttttcgttagttcgttaattttaggagtttggtatattaaatttcgggaattcggaaagggtagttttggagatttttttttttttcgttttgttttttttttattttaagtttattataggtttgttcgcgcgttaggtttagtcgggtcgtttggttttgtaggcggttatttaggtcggtcggtttttattcgtgttcggtggtttagtcgtaatttcgattttaatttatatcgggtttttttgtcgttttagacggcggtttttgtgtattggagagaggtttggtttgagatattcgagttgatattagtgatgttttatattatatattttcgtcgggtttagtcgtgtaattcgttttttttttttttttttttatttttgattttttttttatttttttttttttttgtattcgattgttataaaaagtacgttttatttttatttggttcgataagtagtcgttttggaaggagaggtagttgtaaggagagtttagcgtcgcggttataaagtattagggtggagttgcggaatagcgggcggggtgggagggcgttttcgaaggattttagaaaatttatagattttgtttttaattatttgttatttttattttaggttatttaaattttgtttaggcgagaagagtacgtgagaggttcgtttttttgatgtgtaagagagttaatgaaagattgattttgtttaaaattacgtcgtttaggatttagttttggttttggatagttaaattaaaattatttttaattttttttcggttttttatttattagtatagttttatgttttgtataaatgttatttagagagtgtttttattttttttgatttgggagagtattttggtttttattttttttatcgttgtttttttttttttgtttgttttgttttaatcgggggttttattttttttatttagagtatttaattttttttttttaatagtaaagtttttggatgtcgtttgatttgtttgattttgttttttgtttttagaattttaataaatttggaattttttatcgattagtataaattaggacgttgttattgggttatttatttgagtttatttttgttaatttataaagtatagatttgttataaagttaaggtaagttttttttataaaattatgattataatttagaagagggggtgtgagttttaatttttagagtttaatttttgagagaagataaataaattaagtagaaaagttttttttttttttttttttttttttttaagaggattagtagttgtgtattaaaattttgttttcggagattataaaattaggaaatagggtgtgtgggagagatttgaatggtcgaaataatcgtaaagaaggtgtaagaagcgcgagtttaggagggaaaaagttgggttagggtcgggataaaggttttttagggagggttaattttttcgtgtttttggcgggttttttttgttaaaggtttataggttggagtttgttcgcggtttttggtttggtagggattttattagttttgttttggtaattgtaagttaggaatataatgttttgtgtaggggattgtttatgtagtttagttcgtgagatcgcgggatggcggggtagtgagtcggtgtcgttttgggagtttgagttagggcggtagttttgtcggtttcggagagggaattgtaatttcgtaattaggtcgtcgcgaggttttttgtttttgtaaagttgcgttttatcggcgtttttttaggcggcgttgttttttatatttttttttggtttatttggtttgtatttttataatattttttttttattttttttagatttcgtgttggtttttattcggattcgggttttcgtaaggttggtttatatagcgattttttcgcgtgtggatatgttcgggtagcggtttttttggaaagtggtttttagtttttggagttgttggttggtaaagtgagttcgttgtcgtttttgtcgtttttttttagacgggttttcggcgtttacgtttttattttttttttgttggtttttatttttttttgaaaacgaaatatatatattttttcgttagtatgtttatttgtaacgcggacgttaattggatcggcggtagaagtcgtggaagagttgggttgtttggcgtcggaggagggtgcgcgcggcggtttcgggtcgcgaggagcgttgcgtttgtggggtgtgtaggcgtaagtgtgggtgttcgcgttttattttttttttttttttagcgtcgtacgttttatttatatgtttattttattgtagcggtatatttatttttatagtttgtgtttttaagtatatttatatatttttgcgtagatatattaaattttttgggacgcgtatacgcgcgtggtttatagatttttttttttttcgtagaaagtttagatttttatgcggtttgggaaggttaggaaaagatgtggggattcggttgggtatcgaagttcgtcggtttttttttaaaaaaaaaaaaaaaatgttttttcgcgaagggtatttttgagtggttttaggtaattttttaacgagtggagtttttcgggagttgaaagtcgagaggaaaatagggatagaggtcggcggtttttgaaggttttcgaattaagatgttgggatttttgtgatttaggaaatagaagggaggttagggtacgaatagagagggcggtagaattgttcgcgtttttagcgttttaggagtcgggtcggtcgagggagaattaaagggatgcggggtagttaaaatttcggttttcggaagttttgcggggagttaggcgaacgattatttttattacgttttttttcggaggggttgatttttttggggcgagagggagcgggtggcgtagagtagttgagcgggaatgtttgtagggcggcgcggcgttttatttgcggttttcgggttggaggtgtcggagatggtgtgtatttttagtttgtgtttggaggagtttagcgatcggggttgatcgggagttagaatcgaagttatggttaacggttggggatggtgataggaagatgaggagacggtcgatagtttggttttcgttgttcggtgttttaagtgaagcgggttttttatgtagtttatggacgagggagcgcgacgttttattagtttttggttattgtttcgtcgagttttcgtagtcgtcgttgttcgtttcgggtcgcgttttaggcgcggagttttttcgttgcggggagagttaggggacgtaattttcgtcgagtttttaagttaagttgttttcgtttttttcggaaggtttaagcgaaaaagttcggagacggaaagttagcgggtaaacgaagatatgggatgtgggtagaagggtattatttagagcgtttttagggagtaggtttttaagttttaaagcgaaataagagtgggtaaagatttttttttttttttttttttttttttaagaatttttttaataaggaaagttaacgtcgatcgcgttttgttcgttttttttttacgcggtagttttgatagagaagtgttaagagtgatagggataggtaggtgatattagattttttgcggcggtagtagtcgttgtagttacgacgcggttttttgagcgtatttttcgtaacgcgtatacgtatatttttcgggcggtcgaataggagtcgggttttgtcgtagtttagttttaggtatttaggcgagcgacggattagatttgcggtttcgcgtttttttgttggtttaatattttaaaattagaggcgggttttttggtgtcgagacgttatttcgtcgcggttttttttagtttttttcgttttcgtttttttttagattttttttcgggtgcgattgacgtggtttcgtattaattaggacgtttcgagtcgcggtggagggattgttttgtttgtatttattagtagtgcggggtcgggttattgtttcgtcgtgcgtattgggtttatataggtaagttttcgggaatttagtttttgtttagtttaaggcgattcggtttttagtacgaatttaaaggtgaagagatgaggttaggagtcgaaggtttgggagaagagagtggaatggttaagaagagaaaggtataaggattaataagatatttattttttgtgttttattatatttatttttaattttttattttatataaaaaggagatacgttatttaaaattagaaaatttgaaaaatagtaataaattattttttcgattttaaattttttaaatagtttgttaagtgaatgttgcgttaatttgaagaagttttaattgtaaagaagatagagttttgaaaaggtaggttaataaattagaaatcgagaagtaaatggattcgttaaaagaaaattattttgattttaaacgaataattgtttggtggtttattttggatttatataagaataaaaagtcgttttagattacgttttttgtgatgtttattagtttttagatagaaaatatataatagaagagaaattttaatttagcgtttttaaaatgttgaaagtttatttattttatttaacgttgattaagatatatattttagattttttaaattttttgtatattgtattaagttcgttttaattcgagagagttacgttttaaattcgatttttttgtttattttattattaattagatttaaatttataaagtttgtagaattaataattttgagttaattatatatgaaatatgttttaatgaatttttatataattaagaatgttgttaaataattaattttaaggataatttttaatagttattttttttttttagtgagtttaaggttgttttgagttattaaagtttaagtaggtagaaggggtgtgtgtgagttaagggcgaaaagtttagaattgcgtttaattagtaaaagtaaaattttatttatataaaataaaaaaaattatttttggagatattaattttttatagtattgtttttaagtaaatttaatttttaaagaaattaaagaaagaaatttaaatatatttaaaataatttttgaaagtttttttgttttttagtataggttagttggagaggataaattaattttttttgggtttttgtatgggcgattgttttattatggagttagtgttattatttttgaatgtgtatttgtttgatattatagttaatgatttgtaatgttagtatgaagtatttttaaaatattttttttttgtttttgtttataagattgggaaatttattcgatgtggaataaagtggatgaagtagattataaatatatttgtaatttatgtgttttttttttgttttgattatttttaaattttatttgtaatttttttttattttaaatttgtagtttaaagacgtatatgagaattgttttttagtttttttttattagtattattttattttaagaataatttagttgtaagggaggaatttttttatagtaagttttaaattagtatttttgtttttaattttttattttattttattttattttatatatatagatatttgtttagagtaaaatatatttttatgtgataggtttgtattagttgaggtttatatatttagttatattaggttttgtaattttattattaaattatatatattatattagtagtttgttggtaaagaaggttaaattaatttatattttgtttattatttggtgtttaaatgacgtattttatttcggagatttggcggagaattttttttttagattttatagcgttttattgaagataatgtttttatatttgtagtggtttttaatttgataagattttaatttgtttaagttttttaaataagggttttaaatgtttttagtcgtttttttattgaattttttttaatttttttaagattataaagtatatgtgtaaagtaaatatttttttttattgtattgttagtcgatgatttataattaagttaataagaatttagtttttttttgttgaatgtgtttattaattatattttagtttttttttttaaattttagaatagttgtggtttttataatattatgttttttaaagttttattttatgaagggattttattatattaaagaatgaaaaaaatttttattgtagttagtatatatagttttttattttttgttttttaagatttaaattttagagttgtaaatatttttggaagtttgggtgttaatgttttattttagaaagtcgagaagttttatagagttatatagatttttaaatttattttttataaatttatagaattttgataaaagttttggtggttttattttatcgatggaatttttattacgataaatatatatgtatgaaggattttaattagtttttaaagtggttgaaaaatttaagggtacgtgattgttttttatagtgttaacgtgtgcgagatgttggaagtattggggattagtagtagtttagatgtttaaaaagataaggtgttttaatttgtgtggatttattgaagttaagtggtgaataaagataattatttagataatttagattaaagtaaaagtaaaattatatttatttgtatatatatatttatatttattttatattatagatatatatacgtatatatatattggttttgtaaataattgatttaaagtgaggattttttttgtatttttttagtaggagttttaatatttttttaattttttaattattttatatatttatagtagcggcgattgggtgatattttttttaggttttttgtgtggtaggatattaatatgataagtttgtatggggaaaaggaggtatgtggtgggaattaagaaatattgtttagtgaaaattttgtggtatggtggtggttgattttggagatttaatgtatataagatttgtgggtgtataggtataggtagtatggatgagaaaggggttagaagaaaataaattttatgtattttgtgattttagtattattgtgatttttggttaagttttttttaattggttttagaaattattatgagtttagtttttaatatagaaatttttaatacggagaatattggtgggattttggtagggaaattagaggtgttgtatggtttacgtggggtaaagaaggaaagtttagtgtcggcgtgaggttttgagtttgggagatattaggggttgtttcgattggggttttttgtttatttttttaaagaaagattttagaggagggaaatgtgtgatatggggttagtcgtgttttgtgttggtatttgttatcgattattagttttaaagttttatttaattttatattttttagtgttagttgtgtaaagtttttttggttatggtagtgagcggttgggttgtgtcgttaaatttttcgtattaatttggtttgggatttaattaagtgatttttgatttttggaaagagtttgtttttagagtttatttagaagatggtttaattagatatttttttgagttgttaggttttagacgggtgggagttttgttttgtttaagttagtttaaggacgaggttcgtttggatttagtttggagttacgtgatgggcgtgagtgtgtgagtttttggtaaggcgtagaggttagatggagattttgtattttgttcgagaagtgttttattttttttaatatttggtttttttttgtatataaattaagttgaaaatagtttattatttattattttttatagttatggaattaaataatttagaaattaaaagttttattgtagttgtttttttttttattttttaaatggaatttaaaaagttttggtttgttaaaaggggaagattattttttgaattggaagtttgtagatatattgagtaatagttattttttttgggtttttgtaaatggtatttatttttttaatttatagttttagttgtttaattatttgagatttggggtaattatttgggggaatagtgtttagatggtagtgggagttattattttatagtggtttggggaagagaagagaaagagattagaggagggggtatttgttaaaattatttaacgaatatgttgttaatgtttttttatatttgtatgttattgttatagtttttttaggtgttattgagtttttagaaagtaattatttgtcgaattaagtaaaataaggagaatggtatagtatatgtgtttggagaaggggaaggaagggtggaatatgaaattgagtatagatatttaggttaggaaagaaggaagtggtaaggggttaaatgaagttttattttttcgttatttttttaaataatagttggattaaatatttatttgtttttttttttttttttttttttttttttttagtttatgtttattttttttttttattttttttgtttttttttttttttgtttttttttttttagatatgttggtagttaatatttagtattagttgttatggtgattataaattatttaaatttaaaaatatttatttataatttgagatgaagtttttatttttttagcgaaataatattttaaaagttgttagttgataaaaaaaaaggaatttattttattgtagtaatttaagtaatatattatttttaaaggtttaaattaaaatgttagtttgttaaaaatatgttggtagagttttggatatttttttcgttagatttttataaagaagttgattttgttatttttggtcgttttttaatatatatatataattttgtatgttttttttttttttattaattttttttttttttattaattattttagtttttaaagattttacgtattgggttttaaaagaaaagaatttttttttggattagaaaatagttttattggttgttgaagtgaaagatgtggggtttagggggaaaggttattaggattataatggcggtggtggtaggaggttattttagaggagttaagaagaaaaaaaaatgtagggagaaggattggaggtggaaagatagagtaatagaaaattgagttgggtggttaggtgttgcggtgaagtttagtttcgaaatgataggtatatatttttttatttttgttttttttttttttgagagaaaatttttttagttagagattttggggggtaggaggcgggtaaacgtcgttgtagttgggttttttgttttttattttgggtttgttgttttttgtttattttggattatagggtattcgtttagatgaagagttattaattatttatttagttaatattaggaagacgataaagttttttatataggattaagaagatattagattgttttattagtatatttttgtttacgaataagttttcgttatatatttttttttttttcgagtcgttttaataattgttgtatatattagtagcgggcggtgaggaataatagtcgaattagttttaagaaattttgtgtatcgagttagtagcgaggaacgcgatttgtgaagattatttttgcgggtagggattcgtagggattgattattttcggataattggtataattttttttgggggtgaaaaattataacgcggcggggtattttttaagtgagttgtagatttgattggcgcggggggtgggggaggggaggggagaatgggatggcggaggtcgggcggaggaaagaaaatggaaaattttttttatttttatttcgttgttttttttttaagttttatgtttttttcggtaagtatttgtttttttcgcgttagttatagttagagttttttatttttttttatatatttttttttttttgataaggtttaggattttggttattattttacgtattattattttgcgttttgttagagacggtttgggttgatttcgttggtgtttatgttaggattaaaatttttttatgacggcgaggaaaattgtattatttgtttttagggggtatattaggagtttacgtagtatatgtttcgtaaatattcgttgattgaatgagaggcgcgggggcggggcggcggagaggggtttgcggtcgttaaggtcgttagggttaatttaggtttttcgaagaaggttgggatcgagttgttgtcgcgtgtgaaggtgtgtgtcgcggttgggggtgttataacgggttatggagtttattttttagagggaggaagtttgtgtatattagcgatttgggtcgaatatttttagtttatttattgggttaaagttatttaataattaatgcgtttttgggggaggtcgggggaagtattcgttttttgtcgggacgtaaagttaggcgttaggtttaaaggggttgtagtgtagttcgattttagtacggaatttagagtcgtcgttttgaaattttttaagttagtgatagaggagggttagttcgttttttttttgagggtgaagattattttatgagttttttttaggatttttaaagtaagaaaagttaaagaaaggtttttttgttttagggggtcgtttttagttggtttttatattattttttgttagttgcgtttatttttttttaaatttttggtttttaggggtttttagtcgttttcgtgttattttcgtttcggggttttatttaggttgggtattcgtttaatggatattaaggagaatgggatttattagggaaggaaggtagagtttggattgtttagaggtggattttgtttatatagaacgtttagtttttaacgaggatatggtatttttgggcggcgttgggggtagaggcggagagggtagcgtaatagattattacggttttttgaagaagttatatgttattgtgaattttttttttttttaaaagtaaagaaaaattttaaaaaaatataagaaataaatttttttgttttataagtaggttgtggttaggattttggatattttataagttaatttaaaattagggaaggataggtgttttattttttagtagtgttatagttttgtttattcgtgtgatttttttttgtcgtttattagttttttaaaagttaattaaattaagatttttagtatttttttttattatatgtttttttttaattaatggtattaaacgtgtttaggtagtaattttttttttcggttaaaaagtagaaaaagatatattgagtgtaggggaagagttttttacgtgtattaaaataatgcgggtttgaaagtaatggttaagaaagtaattatttattatttttagttttttatgtgttagttattaaaagcgaacgattaggggcgtttgcgcggtttgtgattggcgtaagtagaatttttttgtttttagtcgttttttgtttatttacgaggattttattttatcgtaggtttttttatttgtttttagaatgtattttttatgtttaggaaatttggggtagggattgggggaaggagatattttgcgtttttttggtttttagtataataagaaatgttagtttcggtttggcgattgcgagttcgtttcgcgcgaagcgagattggggagtttttttagtttggtcggagttagggttgagttcgcgtaaagtattttttttagaagttatcgttgtttttgatttttaattatattttaaatatattacggtttaataatttatttttattatcgattattaaatagaagaagaatttaatataatttaaatgatagaaattacgcgacgttatttttgtattgtttttatttaattttatggggttaatttcggataagtgagcgtttaattggtttagtagggcgattggcggtgtagtgtagtgttcgggcgtgaagtattggatcgttttagacgttttattttaataaatgattatttttttttagatttacggggaaattttaatgtaagatttttgttttttttttagtaatacggtttgtttttttgatcggggttttaaatcgtttttttttattttatattatatttgtatttttatattttaattcggaaagagggggttaggggtcgagggttgtgggggggggggggttttatttgtttatattattaaaggttaatagttttttaaggttaggtatttatttattacggagttaggaaaatagaggaatagtaaatttgaggggtttttttttatgtatttgaaaagaaaggtatttttttttttttattttttatattttttttttcgttttatagaataagttttaatttaggaaaggtttgtggcgtaggttggagattttttaattttttatataagtttgtagattttttttggtaatgtttttcgatttttttagagtgaaattagttaattaagtaacgatatcgttaaaatttaaggtttggtaattagtattttaggtaggttcgcgtcgataggggtaaatttttattttattttgggttgttaagtatagtggttgttttttagttttttagggatgttgtcggtttttcgttttttttttaattagttaaagtaaattttcgttaatttaagttttttttgtttgtttttcgcgatgaatcgcgtatttataagtttgggtggggcgtggttgagagtttgagtgattgagtgggttttggtggtgttgcgcgtagcgggatataacgagcgatagaggtcgttgttggattatttttttacgttagtttagacgtcgaggtttgttggagcgtgcgtaggggattagattatagggagcgagcgagagggagagagaggtgttgggttttaggagtgtagtataatttggggaaaggaattaacgtttttgggacggttgtttttcgttttatttagaggcggagtgtttaagtttaagtagtaggcgcgttaggtttggcggtttcgtttttttgcgtttcgttcgaggtttagagtttcggaggcgggtgtttagcgcgcggtttgcgtttttttttcggttttattattggcgttaggatgttgtcgcgggaagaatttgttgttggttgttttttttcggtttttaggagagttcgtgaattcgatttttttgatttcggagtttttggagaagagatatttaacggtcgtcggttgtacgtttgggttacgcgcgcgttcgttttacgtgcggagagaggcgtttcggatcgcggtcgaaaggagtcggggacgggaggagggggaggggcgaggtaggtcggaggagaaagagggataaagagtaaagatttagttagaggaaagagttgacggtattttcgtttttcggattttttggtaattcggggtaggatggcgtattttttttgcgttttttcggttgtcggcggttttagtcgggaggagtaggttggggggtttcggtatatagcgcgtcgttgttttttagtttatcgtttcgttatagggagaggttattggcgatttggttttgattttttttttgtttaggttggtttttcggggaagcgtttttcgttggggtttcgtcgtagggttagtgtttttttgtcgtttttacgtggcgcggtttttcgttcgatgattcgggtaggagaagggggtttttatttaattgtatatacgtcgatattagtttgcggtagttggtttttatttttcgttatttgtaaaatagaagagaaggaaggttgtaagaagcggcggtcgtcgagtgagtagggtttagatgagattacgttatattagttgttaggcgtttattgtgtgttaggttttaggcgtgttttttcgatttgatagtttttggttgtgtagtagtatttttagtttagtttcgggtttaggatatttatttattaagaggggatttttttttagagttgtcgtaaaagtgtttagaggttagaggattataaagttatagtgtgttggggaggttgtggatttatttttaagaatttcggtgtcggggttaagaatttatttgaacgtaatggtagcgggagtgggtgggtggagaggatttttttttttgggaagttgtatgtaaagattattttttagtgtttgtttattagttggagttcggtaaatatttgtagaatattagcgttaacgtgtttttgttttagatagtagtttttttcggttttttgtaattttgaaacgaacgggtttttggtttagggtgttttaggagcgagttgagttcgggttttttatttattaggagttatttttttatatttagttatatttttttttagagatattaattcggttatttatttatttattataaataattattttaaagtatgatttaagatcgtagaggagagatattgggtggattgagcgagattgaggagagtagggtaaacgtttttggagggtttattgttcgttaaggacggagaaatagttttggtataattgttatttagttttttttttttttttttcgggcgagttaaattttttttacgtttttaattataacgtagcgagttaagtatttaacgcgtttttttttttttgttataggtaagtcgggagaggtgggtttcgaggggttttatcgggtgggtagaagagtcgcggttgttttaaagataagaaaagaaggtttagggttttttaggttttttcgattttagcgtttgtttttttttacgttaattagggtacgtcgacgatcggagggtttatttcgcgcgggtgcggggatcggggtgggagtaagcgttgtcgggttggcggaggtatagaggcggggtagggagttgcgggtttgtttttggtttgagtatcgtttttttgcgtttcggttttttttgaagggagttgggttttggggagtttttggttaaggtcgttgtttataggaggggttgttcggcgttgtggcgtggggatttagggtggggacggttaggcggtttttttattcgttagcgagaacgcgggcggggattttgtcgattcgatttttgtgggttcgtgggtttagaagtagtagtttggcggttttagatttagtgattttgtagtaaaattataggattagtttttgattgagatgtttgttcgtgagatattataaaatttattattatagttttttattaattcgatatgaagtaatatagatgggattttattagtttagattttaaatgtttatttatgataatttcggaggaaatttgtatgttattattatttcgataattttttttttttatatgtttgaattggttgtattattagttggtagtcggagtattgtagatggtaattgtaaatagtttttatttatttattttttttaaagaatgaaatatataaaagaaaaagattgcgttgtttggtgtaaagttagttaattattatatatttttttttttattttttcgtgttttagtgttgaagattaaataaagtaatataaaataaatttttaagaatttatagagttttattttaaggattgaaaagaaggttaaggcgtgttttttagtttatttttatatgtttttgtgatttggagatttattttgtagttaaaatgagttttgagatttgtatttttatgttttatttaatgattaggtttattagaagaattgagtttaaataattggggaagataattttttaaaaagagatttttaattttcgtttgttgatttttaaatttgttttattaagataagttttttgtgagaaatttggttgttagatttcggaattggttttaatggttaattttataaattgagatgggagattttttttgatgggaggtagtttttatttttaaagtttatgttttagttggaatgtatatgttaaggatttttgttttggttaatttgggttttatattgtgagtatataaaaagtattatacggttaacggaggacgaggaattatggtaaagtaggtaggtaagttttaagaaataaaataatttgttaaaaaataatttttgatgattatcgtaagattgaaagtgtaggaaaaatatagttcgaataattttagatttttttatattttttttttttttatatattttgttattttataataaaatttttaatggaaagtttaaaaataaatagtataggaatatgtgttttaaatgaattaaattgtgaaattagttagtaaattaatttgtagtaagtaattatttaaggaaattaaaatattgtttagtttagttttgtattttattatgtgtatgcgttttttataattaattaatataagtgttttaggaatatttgaagataaatacgtttaatttaaggaataaagtatttaaataatttaagtgtaattttgttgagttaaagtaaaatattttataaatgaagtggttatttaattttttagggaaagtttggttattgaaatgttgtatgtttatgttatattaataaaaatttttaatttattttgtttatgtgttttgtttttttgatattattggtatttgaattttagatggatttttgttaaaatgatattttgtgtgataaaagtatttttagttttgattgatagattaaaataaatgtaaggaaatttttttaaattagattaattttttataaaaatattttagaatgtatgaattttgatatttatatttataatggtaaaagtttttttcgtttagtttagtaagataatatttatataaaagagtaaaaaaaaattatattattttatgatagtttgatttttaaattgtttaagaaagtaaagtggttaaattggaaaagaggaatatatttcggaggtttagaatcgaaaattttttttttaatttttagttggaaaataattttttgtatttatttaaagtgtattttttgaagtgttagattggagttgattggtgattaatttaaaggagttataatttaaagaaatggtgagagtttggtatttaggtttggtttttaggtaattcgtttgggtttgagaggttattaattgttagttaagatggaattttttttttttttttttttttttaatggataataatgggaagggggttaattttttagtagttgaaattttgtatttagttttttattttgagaatgttaatttttggttcgaggatttgtttttgtagtgttggtatcgagatttaagggaagatatttcgttttaaatgttagttacggtttggtttttttttcgattttagtattttgtagattgttagtgtttgtggcgggggacgaaaggaatagggttttgtaaggtttgtttgtcgattgcgttattttgggcgaaatttagttttaaaagttataaattatttacggtgaagatttttcgaagtggaataaatttttagattcgtattattttatatttttgcgggatagatggtttttatttatcggttatcgggagagagttgttgttttcgcgttttattgtttttcggggcgatttttagcgagtcgagttttcggttgtacggtaagcgttcgaaagtcgggtttgagaggattgtagggtttttgagggtgttaagtttcgaaggagtttacgggtgtattggggttttcgaaatttagtcgttattggtagtttttttttgtttttttttagttttttcgttcggtttcgtattttttttttttttttttttttttattttttttttttttttttgtttttatttcgtgtggggagtgacgtgacgttagtagagattttattaaattttattgtatagtggcgcgcgggcggtcggtcgagttcggttgcgcggttggcgatttaggagcgagtatagcgttcgggcgagcgtcggggggagcgagtaggggcgacgagaaacgaggtaggggagggaagtagatgttagcgggtcgaagagtcgggagtcggagtcgggagagcgaaaggagaggggatttggcggggtatttaggagttaatcgaggagtaggagtacggatttttattgtggaaaggaggattagaagggaggatgggatggaagagaagaaaaagtaatttgcgttaattcggtagttttaataaattaaagggggagcgttagggtagcggggagatagaaacgtatttttggggagtaaattaggacgggttgggaggaagcgatagggaaagtggtttaagagacggaataaaggataatgtttatggggttgtttgggacgaggcgtgtggagtgtgggtgtgagcgtgcgtgtgtgatttttttttaggtttgtagagttgaggaaagaggttatagtaaagagggattgcggagggaggaaagtgagagatcggtagagggcgggagtggaggtgggcgcggtggggatgggagaggatgagtgaagagaaatttagaagaatggagtgagttagtgggagagggtgggagggttatagtcgggagcgaacgagttaggtttgttagttggggaaggtcgggacgttgggtttagtttagttgggatatcgcgttcgaggttaaggcgggtggattaggtatgttgagagtgtcggcgtataggtgggtacggttacgtattgatttagtgtttacgaagggtttgtattggataaggtttagacgtttatagagtttagaattttttttgttgtatttatatttaataagtttattttgggttacggatattttattttttaaaatgacgaggttaaggtttttggcgaggatggtattaaattgtacgggatagaagtgggggtgggggagagagttttttttaagtttatatttgtttttgtaaagtaaagagtatgtgaaattatagggtatatttttattcgaaaagtgtgttttatttttgaattttgattttttgattttttgatttgagtaaagatgtgtattttggtagtgagtagaatattttggttttgttttgtttttgagtggaaggattataaatataattcgtttggaggattaggtgtgaaggtttttgttaggtatatgggataatgtttttttaattttaagggtattttgttaatgtatgtttttggaaagtgtcggaatatagttattgtttttggattcggatttttttattaatattaatttttgtttgagagtaaaatttaggttcgttattaaaaagatatttttttggtttttaattgagaataaagttttttttaaaagttgtattgttttttttaaattaatatattaatattcgtaattttagaaatatatagtgattcgggagaatgtgtataaaatagatacgtttaaaaaagtttggcgtttaaaattaattttagttattatataggtgttgggttttttttatttttgggggttgtttggaatatgttatgtgtttttttgaattatttcgtgttttgaatttatttgagttagtagtaaaaataggtaaataaatttgtttaatttgttttgagtgttaaatttttttattttgaaatagttaatagtcgatagatggatttattttatggaaagggttagtttttttagttacgaagaaaattgattagagatttatattttaagttatttttaatttttacgtaatattcgtgaaaatttaaattttttttttttatttagtggaaatttaaagtagtgttatttaaggggagagaaatgagggggaaaatgtttacgtgttgtttaattgtattttttttttgattttgagaatttttatttttggtttttgaaatttcgtcgaggtaagaaaattaaatttttttaataagttttataattgaattttagttataggatatcggaaagtgtagttcgagaaagatatttttatttttgtttatcgacgatttttgtagtttttttatttttttgagtaatgggttaataattttttttttttttttttttattttgtagagattaagaggcgttcgtagtagaacggttttgtttttagttggtggcgaggataggtaattttatggaaaagttggaagagaatgagaaaattaaagatagaaagatttagagattcgcggagagatatagggagagggaagggagttgcgttgaaaagacgtaaagatacgcgcgtgtaattttttttttttttaggttttagaggtttgtaaattagggttgagaggaaggggttcgggaagtttacgtttttttcgttttttttttgtttggagtttcgttcgttagaggttggttaattttagtttcggtcgtcgtagatattgcgttgagtttttgggttttcgttttgtttagcgttagtgtagttgaagtgagtagttggtgggaaatgtaaatggtttttggagaaatagaagatatagaatgatttttatttttttttcgagtgtgtggaaggagttggatatacgttttacgtttttaattttttttttatatttttagttatatttttattaaataattaattaatgtttagaattattagggaatatattaggtatgtaatcgtagaagtagggtgttggggggttataaattatcgagttgatttaagacgtggattttaggttttttttttgttaaagtagtaaaggaagagcgggttttggcgattgtatttagatttcgattattttaaattagaagggggtggagggagcgtttaagtaaagtaagtaattttttgttttgtagatgtaaataagattgtagtattaaaggtattagtttttttagggttagatcgtttggattgggagtttggggaaggggagatattaattttacgtatttgtgaattttaaggatgttatatttttatataaataattttagtgcggattttttggaatggggggagtaatatttttattttagaatattaaaatattttttttttaaagcgtatattttttttatttttttaaaattttgaattatgtttaaagataatagttttttagtaaattggagtattggattattttttttatttttttttatcgatattttgatgatttgattttaatgtgtggggggtatagggaattaaatatagtttataaaattaagtttagatgaaatagtgttggttaagtgggtttagataatttttaatgagaattttaattatatttttttttttaatatgttgagataagtgatagaatcgttagaatggtaattaaattggaaagtttagggagaataataatttcgtgattaaattggggtaaaatcgtggataaatgtggggtgattttcgttaattttttgttatttaagagttaggatttgggaaaggtatagtattattttagagttcgttgtgacgggttgtgtgttattatttattttttttattttggattatgattttaattttggtaagtaatttttttagttttttatttgataataagcgagtatgtaaatattaatggttagcgatgtttaattgttttaaatattattgatttgttggttgttttaaattgtttttttagtttaggttttgttttcgaattgtttattttagaggtttgatttatgttttcgatgttataatataataattgtttttttaaaaaaggtatttaagatgaattaattgatttgtatataaattaaaattattatgcgttgtcgatttcggtgttttataattatttcgaaattagtatttaattatttgagttaaaagaatatataaatgtttgtattgatttattaatgaattatttaattaaaacgttcgggtaatgttgggcgttggaaagattgttaaattaagatatattataggagggatatgaagattagaaaggtaatagattaatatttcgtatttaaaacggagttttcggtgatttttagttttaattttggagtaggggttttttttttttgttgttaaaaagattttgtgtttgtttgtgagtgagtgtatttaagtggaaggaacgtttttacggttacggtggtttaggttttttgttcggatcgggattttatagttttaatttaggagcgttaaattttggaagatttcgggttagttttggaggtgcgtggtttcgtaagtcgttaggttaagtttgttttttttgtttgttttttcggtaggttgggcgcgttatggtagtgagtttttcgcgtaaacggagagttggaattaaagttgatatttaatagatatgttaattgagtatttattttcgttttgagaataggaataaaaggtagttttttttaagagaggcggtgtaaaggtacgttataggagtttagaaaaggttggcggcgggaaatttgtagtttgggggttagttaatatttttttttattttaagtatttattgatttgttgttgttatttttggcgacgtagaaggatatttgaaagaatttttgatggggttttgatttgagaaaggaggtgatttgtttaggtttttattaaatttttaattattatattaattgtttttttttattttttattcgatttttttttttttgtttatttttaattttttaattatttagaaatttttttattttttagtggttttttttttgtagtagttttttattcgaatttttttttcgttttttcgtggtagggtttgtatattgatttttttgatttttggtatatttgggttttttgaaattttttaatttttttagatttgaggatggtaggttttattttttttattgtgtgtatatatttagagatatgaaaatttatatagattgtttttaaatttagggtatttaatagatgttttttttttagttcgttttttgatttgaaatgtttgtttgattttaatttggatattatttttttttgtttttttttttttaaagtagtttggatatgtgtgtaagtgagtttagaatagttttatttatattttttattaaattgtaaataaaagaagaattaatgaagtagattggtatatagattgtattaagagttcgaatttttagtttttggattttttatttaattttggttgttatttatattgatagagttattttaagtagaggtttagagaaatttgtattgtgggataataggtaaagttatagtaaaaagtggaataattttaaagttattttattagaatgtaaattgtatttttgggttttgttcgtaattatttagttttaatatatatagagttagataggaaaaaataggttaatatagttattggtattagagaagataaattttatgggttttttagtgaaaagaagatttttaaagtttataatttttgattatttaattttatttataattgtgggaatgaataagatattaattgttttatgtattttatttatattaattaatttgtgtttttattaaaagtagttatatagaattttttttaatttttggtagtaagtttagaaaatgaagtttatagttattttgaattggatatattttttgagttgattatttttgtaagtgtaggaatataatattgtttttttatggtttttttgtatttttttagggtttgtaagtttttattaggtttgatattattgtttgggtttatatttattataagtaaatttgattattatgttgattttaaaatagtttatttggttagtataattttagtttttaaattataaaaattttttaatatacgaagtttttagtttttattttttttagttttttgtttatttaaaatttttattttaattggtgtaagtaataataatttgtattattatttgtattttttttatttttttggagattgggttggattttagagagaatattagtattattattattataaataataaaatttaaaagtaaagtttttatttgtatgataattggtatttggaatgtttttgatttatttaatgttattttataaaggtattttgtaaatttttttggaatttttagtaagagtttgtagtaattggaataattttttgggaagatattttttttgatgggtttttagtttttggaggaatagattgagagtaattagggagggaggggatattggaaattggtagttacgttagttgaaataagtttgggtttagtaaggtgattgatgttgtggttgattttttatttcgagtttttttttaattggggtattgattttttttattttgggattttaaggtattcggtgtgtatgtagattttttttttgtggtttttattatgtggtttcgtagtaggtttttggtttaatgatattttatagttatagtttttatatttattattatgattttaatgtttaggtttttagtgtatttatattaaatttgttttattagtaagttggagtatataggagagatgggggtaagtaaggatttagtagagtttaaatttagatatgtttaaatggttttgattgtgtaaagtgtggtaatgttttttgttgttttagttttttattttaagttttatatgttttttggttaatgaagtgtgatataggttatatgttaggaataatagtatttgttgagaataaagtgaatttaggaaatttggtatatataaaatgtatt

SEQ ID NO: 152 - DNA, 28536 bp, Artificial Sequence
  chemically treated genomic DNA (Homo sapiens)
gatgtattttgtgtatattaggttttttgagtttattttgtttttaataaatattattatttttagtatgtggtttatattatattttattagttagaggatatgtgaagtttagagtggaaagttagggtagtaggaagtattgttatattttatatagttaaagttatttaaatatgtttgaatttgagttttgttgagtttttatttgtttttattttttttgtgtgttttagtttattaataaagtaggtttaatataaatatattaaaagtttaaatattgagattatgataatgaatatgagggttatgattataaaatattattgaattagagatttgttacgaaattatatggtgaagattataagggaggaatttgtatatatatcgagtgttttgggattttaaagtgggaagagttagtgttttaattaaagagaaattcggggtagggaattaattataatattagttattttattgaatttaggtttgttttagttgacgtagttgttaatttttaatgttttttttttttttaattgtttttaatttatttttttagaaattgaaagtttattaaagaggatatttttttagagagttgttttagttattataagtttttgttagaaattttaagaaagtttataaggtatttttataaggtggtattgagtaagttagaagtattttaagtattaattattatgtaaataagggttttatttttagattttgttgtttgtggtggtggtgatgttggtgttttttttggaatttagtttaatttttaaaaaagtaaaaggagtataaatagtaatataaattattattatttatattaattaaaatagaagttttgaatgagtaaggagttagaggaggtaaaaattgggaatttcgtatattaaaaggtttttataatttgaaaattaagattatgttggttaaataggttgttttaaaattagtatagtaattaaatttgtttgtaatgaatgtagatttaaatagtgatgttagatttgataaggatttgtaaattttaaaagagtgtaaaaagattatagaagaataatattatatttttgtatttatagaaatggttagtttaagagatgtatttagtttagggtggttgtaagttttattttttgaatttgttattagaagttaaaagaaattttgtataattgtttttgatggaaatataaattggttgatgtaaatgaaatatataaagtagttggtgttttatttatttttataattataaatgaaattaaatgattaaaaattatagattttggggattttttttttattgaggagtttatggaatttgttttttttagtattaataattgtgttgatttatttttttttgtttaattttgtatatattaaaattaggtggttacgaataaaatttagaaatataatttatattttaataaaatgattttaaaattattttattttttattgtggttttatttgttgttttataatgtaggtttttttgggtttttgtttagaatgattttgttaatgtagatgatagttagagttgaatggggaatttagaaattggggattcgggtttttgatgtaatttatatgttaatttattttattagttttttttttatttatagtttggtaaagaatatgggtggagttgttttgggtttatttgtatatatgtttaaattgttttgaaaaaggaagggtaagaaagagtggtatttaagttggaattaggtaggtattttagattaagagacgaattggaaagggaatatttgttagatattttgggtttgaaggtagtttgtgtaagtttttatatttttgagtgtgtgtatatagtggagagggtggagtttgttatttttaaatttgaaaagattgagagattttagagggtttagatgtgttaaaggttagagggattaatatataggttttattacggaaaggcggggaaaaggttcgaatagaaaattgttgtagaagggaagttattgagaggtaagggagtttttgaataattaaaaagttaagaataagtaaaaggaaggaggtcgggtgggggataaaaaaaagtagttgatgtggtaattaagaatttggtgggagtttgggtaggttatttttttttttagattagagttttattagaaatttttttaagtgtttttttgcgtcgttaaagatgataatagtaaattaataagtgtttgaaatgaaaggggatgttgattagtttttaggttatagatttttcgtcgttagttttttttgaatttttatagcgtgtttttgtatcgttttttttaagaagagttattttttatttttatttttaggacgaaggtaagtgtttagttagtatatttattaaatgttagttttggttttagtttttcgtttgcgcggaaagtttattgttatagcgcgtttagtttgtcggaggggtagatagaaaaagtaagtttggtttggcgatttgcggggttacgtatttttagggttggttcggagttttttagagtttaacgtttttgggttagaattgtaaggtttcggttcgagtaaagggtttgagttatcgtagtcgtgggagcgttttttttatttgaatgtatttatttataaataagtataaaatttttttaatagtagaggagaaagatttttgttttaaaattaaagttgggaattatcggaaatttcgttttgagtgcgagatattggtttgttatttttttaatttttatattttttttgtaatatgttttgatttaataatttttttagcgtttagtattgttcggacgttttaattgggtaatttattagtgagttaatataggtatttatatatttttttagtttaagtggttaagtattaatttcgaaatgattataaaatatcggaatcggtaacgtatagtaattttaatttatatgtaaattaattggtttattttaaatgttttttttaaaaaaataattattgtattgtagtatcggaggtatggattaaatttttagaatagataattcggaaataagatttggattaggaagataatttagaatagttaataaattaataatgtttgaggtagttaaatatcgttagttattggtatttatatattcgtttgttgttagataaggagttggggaaattgtttgttagggttgagattataatttagagtgaagaaagtaaatggtagtatatagttcgttatagcgggttttgaaataatattgtattttttttaaattttgatttttgggtgatagggagttggcggaggttattttatatttgtttacggttttgttttaatttgattacgaaattgttgttttttttgagttttttaatttgattattattttaacggttttgttatttgttttaatatattggggggaggagtgtaattgagatttttattaaaaattatttgaatttatttagttagtattgttttatttaagtttagttttatgggttgtatttaattttttgtgttttttatatattaaaattagattattaaaatgtcggtaggaaagggtgaaggaaatggtttaatgttttagtttattggaagattattatttttagatatagtttaaaattttgaggaaataaaaaggatatacgttttggggggaaaatgttttaatattttagaatgggggtattattttttttattttagagaattcgtattggagttgtttatgtaaaaatgtaatatttttgaaatttatagatacgtaaggttagtgtttttttttttttaggtttttagtttaggcgatttagttttaaaggagttagtatttttgatgttataattttgtttatatttgtagggtagagaattgtttgttttgtttggacgttttttttatttttttttaatttgaagtaatcggaatttaaatatagtcgttaaggttcgttttttttttattgttttgataagggaaaaatttgaaatttacgttttaaattagttcggtggtttgtagttttttagtattttgtttttacgattgtatgtttaatgtattttttggtgattttgggtattaattagttgtttaataggagtatgattaaaaatgtaaaagaaggattaggagcgtgaaacgtatgtttagttttttttatatattcgaggagggaatgagaattattttgtattttttatttttttaggagttatttgtattttttattagttgtttattttagttgtattggcgttgggtaaggcgaggatttaaaagtttagcgtagtgtttgcggcggtcgggattggggttaattagtttttggcgggcgagattttagatagaaggggggcgagaggaacgtgagtttttcgagttttttttttttagttttggtttgtaaatttttgaaatttgaaaggggagggagttgtacgcgcgtatttttgcgtttttttagcgtaatttttttttttttttttgtgttttttcgcggatttttgaatttttttgtttttggtttttttatttttttttaatttttttatgagattgtttattttcgttattagttgaaggtaaggtcgttttgttacgagcgttttttaatttttataaaatgaaaagaaaaaaagggaggattattagtttattatttagaggaatggggaggttgtaaaaatcgtcgatgggtagaggtgaagatgtttttttcggattgtatttttcggtgttttgtaattagagtttagttgtgggatttgttgaagaaatttgatttttttgtttcggcgagattttaaaaattagaaatagaaatttttagagttagagaggaaatataattaaatagtacgtgggtatttttttttttatttttttttttttaaataatattgttttgagtttttattgggtaaagagagaaagtttgagtttttacggatgttacgtggaggttagaaatggtttaaaatgtagatttttaattagtttttttcgtggttgaagaggttaattttttttataaaatgagtttatttgtcgattgttagttattttaaagtgaagggatttagtatttaaaataaattgagtaagtttgtttgtttgtttttattgttaatttaaatgaatttaaaatacggagtaatttaagaaaatatataatatgttttagatagtttttaaaagtagggaaagtttagtatttatatagtgattagggttagttttaagcgttaagtttttttaaacgtatttattttatgtatattttttcgagttattatatatttttaaaattgcgagtattggtatattgatttaggaagagtaatataatttttagagggaattttatttttaattagggattaaagagatgtttttttaatagcgggtttgagttttgtttttaagtaggaattaatattggtgggaaaattcgaatttaggagtaatggttgtgtttcggtattttttaaaaatatatattaataggatgtttttgagattgaaaaaatattgttttatatgtttggtagaagtttttatatttggttttttaggcgaattatatttatagtttttttatttagaggtaggatagagttaaaatattttgtttattattaaaatatatatttttgtttaagttaagaaattagaaaattagggtttagaagtaaggtatatttttcgagtgagaatatgttttgtaattttatatattttttgttttgtaggagtaaatgtggatttgagggaaatttttttttttatttttatttttatttcgtgtaatttaatattattttcgttaggaattttaatttcgttattttaaaaaatgagatattcgtgatttagggtgaatttgttgaatgtaggtatagtagaggaaattttagattttatgagcgtttgagttttgtttagtgtaaatttttcgtgaatattgggttagtgcgtggtcgtgtttatttgtgcgtcgatatttttagtatgtttggtttattcgttttgatttcgggcgcggtgttttagttaagttgggtttagcgtttcggttttttttagttgataagtttagttcgttcgttttcggttgtggtttttttatttttttttattagtttattttatttttttagatttttttttatttatttttttttatttttatcgcgtttatttttattttcgttttttatcggttttttattttttttttttcgtagtttttttttgttgtgatttttttttttaattttgtaggtttgaaagaaggttatatacgtacgtttatatttatattttatacgtttcgttttaaataattttatgaatattgttttttgtttcgttttttgggttattttttttgtcgtttttttttagttcgttttgatttgttttttaaaagtacgtttttgttttttcgttgttttggcgttttttttttgatttattagggttgtcgggttggcgtagattgttttttttttttttttattttatttttttttttggtttttttttttatagtgggagttcgtgtttttgtttttcggttggtttttaagtgtttcgttaggtttttttttttttcgttttttcggtttcggttttcgatttttcggttcgttggtatttgttttttttttttgtttcgtttttcgtcgtttttgttcgtttttttcggcgttcgttcgggcgttgtgttcgtttttggatcgttagtcgcgtagtcgggttcggtcggtcgttcgcgcgttattgtgtagtggagtttggtggaatttttgttgacgttacgttattttttatacggagtaggagtagagggaagagagagggatgagagggagggagaggagagagagtgcgagatcgagcgagaaagttggagaggagtagaaagaaattgttagtggcggttagatttcggaggttttagtgtattcgtggattttttcggaatttggtatttttaggagttttgtagtttttttaggttcggttttcgggcgtttgtcgtgtagtcggaggttcggttcgttggaaatcgtttcgggaagtagtgggacgcggagatagtagttttttttcggtagtcggtaagtggaggttatttatttcgtagggatgtgagataatgcgagtttggaaatttgttttatttcggagaatttttatcgtaggtgatttgtggtttttggggttaagtttcgtttaaggtaacgtagtcggtaaatagattttgtaaagttttgtttttttcgtttttcgttatagatattaataatttatagggtgttgaagtcgagagggaagttagatcgtggttggtatttaaaacgaggtatttttttttaaatttcggtgttaatattgtaggaataaattttcgggttaaggattagtatttttaagataaagggttgggtataaagttttagttattggaagattagttttttttttattgttatttattgggaaaaaaaagaaaagaaaaagattttattttaattggtagttagtgattttttaggtttaagcgaattatttgggagttaggtttggatgttaagtttttattatttttttggattgtaatttttttaaattgattattagttaattttaatttggtattttaggagatatattttaaatggatgtagagaattattttttagttggagattaagaaaaaaattttcgattttaaattttcgaaatatgttttttttttttagtttaattattttatttttttaagtaatttagaaattaaattattataaggtggtgtgatttttttttatttttttgtgtgagtattgttttattaaattaaacggaaaaaatttttattattataaatgtaaatattagaatttatatattttaaaatatttttatgaaaaattaatttgatttaaagaaatttttttgtatttgttttagtttattaattaaaattaaagatgtttttattatataaaatattattttggtagaaatttatttaaaatttaaatattaataatattaagaaaataaagtatataagtaaaataaattgaagatttttgttgatgtaatatgagtatataatattttaataattaaattttttttaaaaaattaaatagttattttatttgtggaatgttttattttaatttagtaaaattatatttaaattatttaggtgttttgttttttaagttaagcgtgtttgtttttaaatgtttttaaagtatttatattaattggttgtaaagaacgtatatatatggtaaaatatagaattgaattgagtagtattttaatttttttaaataattatttattataaattaatttattggttaattttataatttagtttatttaaaatatatgtttttgtgttgtttatttttaaattttttattaaagattttgttatggggtaataaagtgtatgaaaaggggggaaatgtgaaaggatttgggattattcgaattgtattttttttgtatttttagttttgcggtagttattagaaattattttttagtaaattgttttattttttagggtttgtttgtttgttttgttatggtttttcgtttttcgttagtcgtgtagtgttttttgtgtgtttataatataaaatttaagttggttaaaataagagtttttggtatatatattttaattagaatatgaattttgggggtgagaattattttttattaggaaaagttttttattttaatttgtgagattagttattgaagttagtttcgaagtttggtagttaaattttttatagaagatttgttttgatagggtaagtttaaggattagtaggcgggaattggaggtttttttttaaaaaattattttttttagttatttagatttagtttttttagtaggtttggttattaaatgaagtataaaaatgtaagttttaaggtttattttgattgtaaaataaatttttaagttataaggatatgtaggagtgagttaaggaatacgttttgattttttttttagtttttagagtggagttttatgagtttttgaagatttgttttgtattgttttgtttggtttttagtattgaagtacggggaagtggggggaagaatgtgtaataattgattgattttatattaagtaacgtaattttttttttttgtatattttattttttaaaaaaaataaataaataaaaattatttgtagttattatttgtagtgtttcggttattagttaataatgtagttagtttagatatataaaaaaaaaagattatcgaaatgatgatgatatgtaaatttttttcgaaattattataagtaaatatttgaagtttggattaataaaattttatttgtgttattttatatcgagttagtagaaagttgtgataatgaattttgtaatattttacgaatagatattttaattagggattaattttgtgattttattgtagaattattaaatttggagtcgttaaattgttatttttgggtttacgggtttataaggatcgaatcggtagagttttcgttcgcgttttcgttagcgggtgggggaatcgtttggtcgtttttattttggatttttacgttatagcgtcgggtagttttttttgtaggtagcgattttggttagaggttttttagggtttagttttttttaggagaggtcgagacgtagggaaacggtatttaggttagaggtaggttcgtagttttttgtttcgtttttgtgttttcgttaattcgataacgtttgtttttatttcgattttcgtattcgcgcgaagtgggtttttcggtcgtcggcgtattttggttagcgtggagagaggtaggcgttgagatcgaaggggtttagggagttttggattttttttttttgtttttaaagtaatcgcggtttttttatttattcggtggagtttttcgagatttatttttttcggtttgtttgtggtagagaagggggagcgcgttaaatgtttggttcgttgcgttgtggttgaaaacgtgaaaaagatttggttcgttcgggagagaaagggggagaattgggtagtagttatattagagttattttttcgtttttggcgggtagtaaattttttaagaacgtttgttttgttttttttagtttcgtttagtttatttagtgttttttttttgcgattttaaattatattttagggtaattatttgtagtaagtaaataaatggtcgggttagtatttttaggagaaagtgtggttaaatatggaaaagtggtttttgatggatgagaggttcgaatttagttcgtttttgaaatattttaggttaagagttcgttcgttttagaattatagaaaatcgagggaaattgttgtttaggataggggtacgttggcgttgatgttttataaatgtttatcgagttttaattaatggataagtattgaagggtggtttttgtatatagttttttaaagagaaaagttttttttatttatttattttcgttgttattgcgtttagatgagtttttaatttcggtatcgagatttttgaaagtaggtttatagtttttttagtatattgtggttttatagttttttaatttttgggtatttttgcggtaattttggagggagatttttttttgataaataaatgttttgggttcgaggttaggttggagatgttgttgtatagttagaggttgttaggtcggaaaaatacgtttgaagtttagtatatagtaggcgtttaatagttagtgtaacgtagttttatttgagttttgtttattcgacggtcgtcgttttttatagtttttttttttttttgttttgtagataacggggaatggagattaattgtcgtaaattggtgtcggcgtgtgtgtaattaggtaagaattttttttttttgttcgggttatcggacgggaggtcgcgttacgtgagggcggtaagagggtattggttttgcggcgaggttttagcgaggggcgttttttcgaggggttagtttgggtaggaaggaaattagaattaaatcgttagtggtttttttttgtggcggggcggtggattaggaagtagcggcgcgttgtgtatcgaagttttttagtttatttttttcggttggaatcgtcggtaatcggggaggcgtagaaagagtacgttattttgtttcgggttgttagagggttcgggggacggggatgtcgttagtttttttttttaattgggtttttgttttttgtttttttttttttttcggtttgtttcgttttttttttttttttcgttttcggtttttttcggtcgcggttcgggacgttttttttcgtacgtggggcgggcgcgcgcgtggtttaggcgtgtagtcggcggtcgttgaatgttttttttttaaagatttcgaaattaaaaaggtcgagtttacggatttttttgagagtcgaaaagaggtagttagtagtaagtttttttcgcggtagtattttggcgttaatggtaaggtcgggagggaagcgtaggtcgcgcgttgggtattcgttttcgggattttgggtttcgggcgaagcgtaagaaggcgaggtcgttagatttgacgcgtttgttgtttgaatttagatatttcgtttttgggtgggacgggaagtagtcgttttagggacgttaatttttttttttaaattatattgtatttttgagatttaatatttttttttttttttcgttcgttttttgtggtttgattttttgcgtacgttttagtaaatttcggcgtttaggttggcgtggaaaagtggtttaatagcgatttttgtcgttcgttatatttcgttgcgcgtagtattattagggtttatttagttatttaggtttttagttacgttttatttagatttgtgggtgcgcggtttatcgcgggaggtaagtaagggaaatttgagttggcgaaggtttgttttggttggttgggggaggggcggggggtcgataatatttttgaagagttggagggtagttattgtgtttagtagtttagggtagaatggaggtttgtttttgtcgacgcgaatttgtttgaagtattggttgttaggttttgggttttggcgatgtcgttgtttgattggttggttttattttggaggaatcgagggatattgttagaggaggtttataggtttatgtaaaaagttaaaaagtttttaatttacgttataggttttttttgaattgaaatttgttttatggggcggaggggggggtgtaagggatggaggagggaagatgtttttttttttaaatatatggaaaaaaattttttaaatttattgtttttttatttttttggtttcgtagtaaataagtgtttagttttaggaggttattgatttttgataatgtgagtagataaagtttttttttttttatagttttcggtttttaatttttttttttcggattaaagtgtaagaatataaatgtaatatgggatggaggggggcgatttgggatttcggttaaaaaaataaatcgtattattaagaagaaaataaaggttttgtattggagttttttcgtgaatttgagagaaaatgattatttgttgaaatgaagcgtttaaagcgatttagtgttttacgttcggatattgtattatatcgttagtcgttttgttgggttagttaaacgtttatttgttcgggattaattttatggggttaaatgggggtaatgtagagataacgtcgcgtgatttttgttatttagattgtgttaaattttttttttgtttgataatcggtagtaaaaataaattattagatcgtagtatgtttgggatatggttaaaaattaagagtagcgatgatttttggggagaatgttttgcgcgggtttagttttggtttcggttagattagaggagttttttaatttcgtttcgcgcggggcgggttcgtagtcgttaagtcgaggttgatattttttattgtgttgggagttagagagacgtaaaatgttttttttttttagtttttattttaggttttttagatatggggaatgtattttgaggataggtggagaagtttacggtaggatggggttttcgtaggtgagtaggaaacggttaagagtagaggagttttgtttgcgttagttataagtcgcgtaggcgtttttggtcgttcgtttttgataattagtatataaagaattagaaataatgaatgattgtttttttaattattatttttaggttcgtattgttttagtgtacgtgaaaggttttttttttatatttaatatgtttttttttattttttgatcgaaaagaaaaattgttgtttaaatacgtttaatgttattaattaagaaaaggtatgtaatgggaagaaatgttgaaaattttgatttaattggtttttaaggaattagtagacgataaaaaaaaattatacgagtgggtaaagttatagtattgttgaaggatagagtatttatttttttttgattttaagttaatttatggaatatttaaagttttggttatagtttgtttgtaaaataaaaggatttattttttgtgtttttttaaagtttttttttgtttttaaagagaaaaaaagtttataatgatatatgatttttttaaaaggtcgtgatagtttattacgttatttttttcgtttttgtttttaacgtcgtttaaaaatattatgttttcgttaaagattaaacgttttgtataggtagagtttatttttaagtagtttaggttttgttttttttttttagtgagttttattttttttggtatttattgggcggatgtttagtttggatagaatttcgaaacgggggtagtacgagagcgattggagatttttaaaagttagaggtttgagagagggtggacgtagttagtagaagatggtgtagaagttagttgagaacgattttttagagtaaagagatttttttttggttttttttgttttgggggttttgaaaggaatttataaaatggtttttatttttaggaggaggacggattgatttttttttgttattggtttaaaaagttttagggcggcggttttgggtttcgtgttgaaatcggattgtattgtagtttttttggatttgacgtttggttttgcgtttcgataaggggcgggtatttttttcggttttttttaggaacgtattaattgttaaatagttttggtttagtggatgggttgaaagtgttcgatttaagtcgttggtgtgtatagattttttttttttgggaggtgggttttatggttcgttgtggtatttttagtcgcgatatatatttttatacgcggtagtagttcggttttaatttttttcgaaggatttgggttaattttggcggttttggcggtcgtagattttttttcgtcgtttcgttttcgcgttttttatttaattagcgaatgtttgcggagtatatattacgtggatttttaatgtattttttgaaagtaaataatatagtttttttcgtcgttatgaagggattttaattttaatatggatattagcgagattagtttagatcgtttttagtaaaacgtaaaatggtggtgcgtggggtggtgattaaggttttgagttttgttagaaagaaggggatgtgtagagaaaggtggagaattttagttgtggttagcgcggaagggataggtgtttgtcgaagggggtatgaggtttgaggaaaaagtaacgaaataggggtaaggagagttttttattttttttttttcgttcgattttcgttattttatttttttttttttttttttatttttcgcgttaattaaatttgtagtttatttgaaaggtgtttcgtcgcgttgtggttttttatttttaggggaaattgtattagttgttcgaaagtagttagtttttgcggatttttgttcgtaaaagtggtttttataggtcgcgtttttcgttgttgattcggtatataaagttttttaaggttggttcggttgttattttttatcgttcgttgttaatatatgtagtagttgttagagcggttcgggggaaaaggaaatgtataacgaaagtttattcgtgagtaggaatatattaatggaataatttgatgtttttttaattttatgtaaaaagttttgtcgtttttttaatattgattgaatgggtaattaatggttttttatttaggcgaatattttgtaatttaagataggtaaaagataataagtttaaggtagaagataaaaggtttaattgtagcggcgtttgttcgttttttattttttagggtttttgattaggaaagtttttttttagaggagaaaaaggtaggagtgggagaatatatatttattatttcggggttagattttatcgtagtatttgattatttagtttagttttttgttattttgtttttttatttttagtttttttttttgtatttttttttttttttaatttttttaggatgattttttattattatcgttattatggttttaataatttttttttttaaattttatattttttattttagtaattaatgaggttgttttttgatttaggaggagattttttttttttagaatttaatgcgtagagtttttgagaattaaagtagttggtaggggaggaagaaattaatagaaagggagagagtatatagaattgtgtgtgtatgttaaagagcgattaggaatgatagagttaatttttttgtgaggatttgacgggaagagtgtttaagattttattagtatgtttttaataggttgatattttaatttaaatttttagaagtaatatattatttgggttattataatgaggtgggtttttttttttttgttagttgatagtttttaaaatattatttcgttagggaaataaaagttttattttagattataggtgggtatttttggatttaggtgatttatggttattatgataattaatgttgaatgttagttattagtatgtttgggagagagaaaatagaaagaagggagagtaaaagaaatagaaaagggagatggatataagttggagagggaagaaaagagaaaaagaggaagatagatgagtgtttaatttaattgttgtttaaaaaagtggcgggggggtgggattttatttagttttttgttattttttttttttttgatttggatatttatgtttaattttatattttatttttttttttttttttttaaatatatgtgttatattattttttttattttatttagttcggtaagtagttgttttttggagatttagtgatatttaggaaaattgtggtagtaatatgtaaatgtgaggaagtattaatagtatgttcgttgagtgattttagtaaatgtttttttttttaatttttttttttttttttttttaggttattgtgaggtggtaatttttattgttatttgaatattgtttttttaggtagttattttaaattttaaatggttgagtagttagagttgtgggttggaaaaatgggtattatttgtagggatttagagagggtggttgttgtttaatatatttatagatttttaatttagaaaataattttttttttttgataagttagagttttttaaattttatttaggaaatggggaaaaggatagttatagtgaagtttttaatttttgggttatttggttttatagttatgaggggtggtgggtagtggattgtttttagtttggtttgtatgtagagaaaagttagatattggagggggtggggtatttttcgggtaggatgtaaggtttttatttgatttttgcgttttattaggagtttatatatttacgtttattacgtggttttaagttgagtttaggcgggtttcgtttttgagttagtttgggtagggtaggatttttattcgtttaaggtttaatagtttagggagatgtttaattaagttattttttgggtgaattttgaagatagattttttttaaaagttagagattatttggttgagttttaggttagattgatacggagagtttggcggtatagtttaatcgtttattgttatggttagagggattttgtataattaatattgaagagtgtgaaattaaataagattttaagattggtaatcggtggtaaatattagtataaaatacggttgattttatgttatatattttttttttttagggtttttttttgaaagaataagtaagaaattttaatcgagataatttttgatgttttttagatttaaaattttacgtcggtattgggttttttttttttgttttacgtgagttatgtagtatttttagtttttttattaggattttattaatgtttttcgtattggaaatttttgtgttagaggttgaatttatagtaatttttaaaattaattaagaagaatttagttagaggttatagtaatgttggaattataaaatgtataagatttatttttttttggttttttttttatttatgttgtttatgtttgtgtatttataagttttatgtatattaaatttttaaaattaattattattatgttatagagtttttattggatagtgttttttagtttttattatatatttttttttttttatgtagatttattatgttggtgttttgttatatagggggtttgagaagaatgttatttaatcgtcgttgttgtgagtgtgtaaagtgattaggagattaggagaatgttgaaatttttgttggaaaaatgtaaagaaaatttttattttgagttagttgtttatagagttagtgtgtgtgtgcgtgtgtgtgtttgtaatataaaatggatgtgaatatatatatataaatagatatggttttgtttttattttaatttgaattatttagataattgtttttatttattatttgattttaatgggtttatataaattaggatattttatttttttaggtatttaggttgttgttgatttttagtgtttttaatatttcgtatacgttggtattatgaggagtagttacgtgtttttgggttttttaattattttggaggttgattgaggttttttatatatgtatatttgtcgtgatgaaagttttatcggtagagtggagttattagagtttttattaaaattttgtgggtttatgagagatgggtttagaaatttatatggttttgtggggtttttcggttttttaaaataaggtattaatatttaagtttttaaaaatatttgtagttttggggtttgaattttgaaaaataaggagtgaggggttgtgtatattaattatagtggagattttttttattttttaatgtgatggagtttttttatgaaatgaagttttaaggggtatggtattgtggggattatagttattttgaggtttaaaagaagaaattggaatatgattagtaaatatatttagtagaaaagagttggatttttattgatttagttataggttatcggttggtagtgtaatgggaggaaatatttattttatatatatattttatgattttgggggaattagaggaaatttaataagaaaacggttagaaatatttaaaatttttatttaaaagatttaagtaaattagagttttattagattaaaaattattataaatgtaagagtattgtttttagtgaaacgttgtggggtttgagaaggagatttttcgttaaattttcgggataaaatgcgttatttaagtattagataatgagtagaatgtaaattaatttaattttttttattaataggttgttagtgtaatgtgtataatttagtgataagattgtaggatttaatatagttggatgtatgagttttagttaatgtagatttgttatatgaggatgtgttttattttgagtaggtgtttgtatgtgtggaatggggtaaagtggaataaaaggttaaaagtagaaatgttgatttaaagtttattatgaagaaattttttttttgtagttaaattatttttaaagtgggatgatattggtgaagaaagattgaaaaataatttttatgtgcgtttttggattgtaagtttaaaatggggaggagttgtagatagggtttgggggtggttagggtaaaggagagatatataagttgtaaatatatttgtagtttgttttatttattttgttttatatcgaataagttttttaattttgtgaataaggataaggagggagtgttttaaagatattttatgttggtattgtaaattattgattgtaatgttaaataaatatatatttagagatgataatattaattttatagtaaaataatcgtttatgtagaaatttagaggagattagtttgttttttttagttgatttatgttgggggataaaaggatttttaaaaattattttgaatatgtttggatttttttttttaatttttttggaaattaaatttgtttggaaatagtgttataaagagttgatgtttttaaaggtgattttttttgttttatataaataaggttttgtttttgttagttgagcgtagttttaggtttttcgtttttagtttatatatattttttttgtttgtttggattttaatggtttaagatagttttgagtttattgggaaaagaaaatgattgttaaaaattatttttgaaattggttatttggtaatatttttaattgtatggaaatttattaaggtatattttatatataattagtttaaggttgttgattttataggttttatggatttaaatttgattgataataaagtaaataagagagtcgaatttaaagcgtggttttttcgggttaggacgagtttaatatagtgtataaggaatttgaaagatttaggatatgtgttttaattaacgttaagtagaatggataagtttttagtattttgaaaacgttgggttagggttttttttttattgtgtgttttttgtttggggattaataagtattatagagaacgtgatttgaggcgattttttatttttgtataaatttagagtgaattattaaatagttgttcgtttaaagttaaggtaatttttttttgacgggtttatttgtttttcgatttttaatttattagtttgtttttttagggttttgttttttttgtaattaaagtttttttagattagcgtagtatttatttgataggttgtttggaaaatttaagatcggagaggtgatttgttgttgttttttaaattttttagttttaagtaacgtgttttttttttatatggggtgggggattggaaatggatgtagtgagatataaagagtgggtgttttgttgatttttgtatttttttttttttgattattttattttttttttttaagttttcgatttttagttttatttttttatttttgggttcgtattaaaagtcggatcgttttgggttgggtaggagttgaattttcgggagtttgtttgtgtagatttagtgcgtacggcgaggtagtagttcggtttcgtattgttgataggtgtaggtaggatagtttttttatcgcggttcggggcgttttgattggtgcggagttacgttagtcgtattcggagaagggtttgggaggaggcggaggcggagagggttggggagggtcgcggcggagtgacgtttcggtattaggaagttcgtttttggttttaagatgttaggttaatagggaagcgcggagtcgtagatttggttcgtcgttcgtttgggtgtttggagttgagttgcggtaaggttcggtttttgttcgatcgttcgaggggtgtgcgtgtgcgcgttgcggagggtgcgtttagagggtcgcgtcgtggttgtagcggttgttgtcgtcgtaggggatttaatattatttatttgtttttgttatttttgatatttttttgttagggttgtcgcgtggggggggggcgggtagagcgcggtcggcgttagttttttttattggaggggtttttgggggagggagggagagaagaagggggtttttgtttatttttgtttcgttttggagtttggaagtttgttttttaaagacgttttgagtggtgtttttttgtttatattttatgttttcgtttgttcgttgatttttcgttttcggattttttcgtttgagtttttcggaggagacgggggtagtttggtttgagaattcggcgggggttgcgttttttggtttttttcgtagcggggaaatttcgcgtttagagcgcgattcggagcgggtagcggcggttacgggggttcggcggggtagtagttaaggattagtagagcgtcgcgttttttcgtttatgaattgtatgaaaggttcgttttatttggagtatcgagtagcggggattaagttgtcggtcgtttttttatttttttgttattatttttagtcgttagttatggtttcggttttggttttcggttagtttcggtcgttggatttttttaagtataggttggaggtgtatattattttcgatatttttagttcggaggtcgtaggtaaggcgtcgcgtcgttttgtagatattttcgtttagttgttttgcgttattcgttttttttcgttttaaggaagttagttttttcggggggaggcgtggtgggagtggtcgttcgtttggtttttcgtagaattttcgggagtcggaattttgattatttcgtatttttttagttttttttcgatcggttcggtttttggggcgttaagggcgcgagtaattttgtcgttttttttattcgtattttggttttttttttgttttttgggttataaaaattttagtattttgattcgaggatttttagaggtcgtcgatttttgtttttgtttttttttcggtttttagttttcgaggagttttattcgttaggaaattgtttgaaattatttagaaatgtttttcgcgaagaggtattttttttttttttttgggaaagggtcggcgaatttcggtgtttaatcgaatttttatatttttttttagtttttttaaatcgtatggaaatttgagttttttgcgagggggaggggggtttgtaaattacgcgcgtgtgcgcgttttaggagatttggtgtgtttgcgtagaggtgtataaatatatttgaaagtataggttataaaagtgaatgtgtcgttgtagtgagataaatatgtaaataaaacgtgcggcgttgggggaggggaggaaatggggcgcggatatttatatttgcgtttgtatattttataggcgtagcgtttttcgcggttcggagtcgtcgcgcgtattttttttcggcgttaggtagtttagtttttttacggtttttgtcgtcggtttagttggcgttcgcgttgtaggtgggtatgttgacgggaaagtgtgtgtgtttcgtttttagagaaagataaaagttagtaggggaagaatgaggacgtgggcgtcgaggattcgtttaagaagaagcggtaaaggcggtagcggatttattttattagttagtagttttaggagttggaggttattttttagaggaatcgttattcggatatgtttatacgcgaagaaatcgttgtgtggattaattttacggaagttcgagttcgggtaggagttagtacggagtttgggagggatggggggaggatgttgtggaggtataggttaagtagattaggagagaatgtggaaggtagcgtcgtttgggagggcgtcggtggggcgtagttttgtaaaggtagaaggtttcgcggcggtttggttgcgagattatagtttttttttcgaggtcgataggattgtcgttttggtttaggtttttagagcggtatcggtttattgtttcgttatttcgcgattttacgagttgggttgtatgggtaattttttgtataggatattgtgtttttggtttgtagttgttagagtagagttaataaaatttttattaggttaagagtcgcgaataggttttaatttgtgagtttttaataaggaaaattcgttagagatacggaagagttggttttttttgggaaatttttgtttcggttttggtttagtttttttttttttgggttcgcgttttttatattttttttacggttgtttcggttatttaggttttttttatatattttattttttagttttgtgattttcgggagtaaagttttaatatataattattagtttttttagaaggagaaagaaaaaaagaagaaagatttttttgtttggtttatttatttttttttaggagttgaattttggaaattgaaatttatatttttttttttaaattataattatagttttgtaaaaagggtttattttaattttgtagtaaatttgtattttatggattggtaaaaatgagtttaaataaataatttaatagtaacgttttggtttatgttggtcggtggaagattttaaatttgttaggattttggaagtagaaaatagaattaagtaaattaagcggtatttagaggttttgttgttaaaaaaaaaaaattaagtgttttgggtagaaaaaataaagttttcggttagagtagagtaaataaaaagaagaaaataacgataaaaagaataaagattaaaatgtttttttaaattagagggaatgaagatattttttgggtggtatttgtgtaaggtatgaggttatgttggtggataaaaggtcgggaagaagttgaaaatggttttagtttaattgtttagagttagagttgggttttgggcggcgtggttttgagtaaggttagttttttattagtttttttgtatattaagggaacgggttttttacgtatttttttcgtttgagtaaagtttagatggtttagggtagaaatggtaagtaattaaagatagagtttatgggttttttgggatttttcgaaaacgtttttttatttcgttcgttatttcgtagttttattttagtgttttgtagtcgcggcgttgggttttttttgtagttgtttttttttttagggcggttgtttgtcgagttaagtgggagtgaggcgtgttttttatagtagtcgggtgtaaagaggaagggggataaaaaggaaattaagaatgaaaggaaaaagagaaaaagcggattatacggttgggttcggcggagatgtgtaatgtgaaatattattggtgttagttcggatattttaggttaggtttttttttaatatataaaagtcgtcgtttggggcgatagggaggttcgatgtggattgggatcggggttgcggttgggttatcggatacgggtggaagtcggtcggtttgggtggtcgtttgtaaagttaaacgattcggttgggtttggcgcgcggataggtttgtggtgggtttagggtaaagaagaggtagagcgaaagaagggggaatttttaaaattatttttttcgggttttcggagtttaatatgttaagtttttggagttaacgagttgacgaagaggtggttttttgttttttatttggttgttttgttaggcgagaaagagtgttggcggtttagtttttgttaagggagtacgtattagggggtgggggacgatagtggaggttagggaaggaagggaggaattgcgtgggagaaagagcgattttttagtgtttttttagttttttttttttattcgtgggtttgtggttttggaatggaagtaagtttgtaaggtgtttcgggaagggttggaaaagtttgttgtttcgcgtttgttttatattaagtgtttttggatttggagaaacgtttggttgagtgattaaatcgttcgtaggtttttatgcgttcggttgaggtttgtggcgtagtttcgagttttagttcgtaggttagagtagattaggttttttgcgtttggtggagattcgggttagtaattgaaagttggttttggtattttggtgtgtagggcggtgtagtgaagcgaggttagggtgtgtgagtgcgttagcgtgtgtgtcgggggaaggcgggggttggttttcgatggaagttttagtaatttgtattgtggtatttgtttgtttttttgttttaatcgtttttaggtttggtttaagaatcgtcgggttaaatggagaaagagggagcgtaattagtaggtcgagttatgtaagaatggtttcgggtcgtagtttaatgggtttatgtagttttacgacgatatgtatttaggttatttttataataattgggtcgttaagggttttatattcgtttttttatttattaagagtttttttttttttaattttatgaacgttaattttttgttattatagagtatgttttttttatttaattttatttcgtttatgagtatgtcgtttagtatggtgtttttagtagtgataggcgtttcgggttttagttttaatagtttgaataatttgaataatttgagtagttcgtcgttgaatttcgcggtgtcgacgtttgtttgtttttacgcgtcgtcgattttttcgtatgtttatagggatacgtgtaattcgagtttggttagtttgagattgaaagtaaagtagtattttagtttcggttacgttagcgtgtagaattcggtttttaatttgagtgtttgttagtatgtagtggatcggttcgtgtgagtcgtatttatagcgtcgggattttaggattttgtcggatggggtaatttcgtttttgaaagattgggaattatgttagaaggtcgtgggtattaaagaaagggagagaaagagaagttatatagagaaaaggaaattattgaattaaagagagagtttttttgattttaaagggatgtttttagtgtttgatattttttattataagtatttttaatagttgtaaggatatatatataaataaatgtttgattggatatgatattttaatattattataagtttgttattttttaagtttagtattgttaatatttaaatgattgaaaggatgtatatatatcgaaatgttaaattaattttataaaagtagttgttagtaatattataatagtgtttttaaaggttaggttttaaaataaagtatgttatatagaagcgattaggatttttcgtttgcgagtaagggagtgtatatattaaatgttatattgtatgtttttaatatattattattattataaaaaatgtgtgaatattagttttagaatagtttttttggtggatgtaatgatgtttttgaaattgttatgtataatttattttgtgtataatatttcgtataatattattgttttattttttagtaaatatgaaataaatgtgttttattttatgggagtaaaatatattgtatataaattggtttggattttttttttttttttttgttattaatttggttaggatattttagttattgttttttaaataaattagttttttttgtttgtttagttaaatatataaggtagtagtttttatttaaatttggtagaaataaatgatagttatttattagaaattaaaaagaaaaaaaaaggtattttcgggggggaaaagggttataaaatttaattttgtttttttaatttttttttggtttaaatttagaggattttattatggttagtaaataatatgaaaaagaaaaaagaagaaagaaatttagtaagtttattagtttaaaatgatttttaagtttatttttttacggggaaatttatatttttagtaaattgttttggagaaatatttgtgtatgtatatatgtatagtttatatgtattttttttaggaggaatatatttataataaatttatagggaaatatttttagtttaaaatatttaggtttttacgtttatttttaggtttaagtagagagattttttatgttatattgtattattatttttaaattttttggagatattaaaagaaataaagatgatttttaataattatagttttttagttttttaaagaatttaggggttgagaggttagagtggagttttttgagttttgtcgagtaatatgtagttgaggtaaaggttatgttttcggtgttttgttttaaataatattgatttattaattttaaatttgtttgtttttgaaattatataggattatagtttgtaaattgtaggataatgaagtaaattaagatgaattatagttttggttttttttgttattttttgatatttaaatagggaatgagttcggtgtgagtgtttaaatgaattttaagtattcgatttttttttattcgcgatttttagttttaaaaaaatgtgaaatttgattttataataaatagaaataaatattatttagttttagagaatttatttttatggcgttaggagggtcgttgtggaggtggggggagggatgtgttgagattttttgttatgtttgttaatttttcgtataattaaagtgggcgagaataaatattacgttggggaatttagagtaaaaagtaatcgtcgattttttggagtcgataatattattgttttttcgttttagttgtttttatttgaatgaaattttatttagaagtttttggagttcgaatattgagtttttgttttgtaagaaattgttgttgttatttaaagagatcgtagataatgttttcgatttaagattagtgtttaacgtatattttttttttttttaaagttttgttttcgatttgcggagggattacgtagtagtggggggtagataaaagttttttggacgagggttattttttattatgttgtttatttgagagtagtggagaggaaaacggtttttacgggcggattttggtttttggagtcgtagggtttagcggtttcggttttttcgttttttagtttggtagggggcggggagggttaaagggcggaggggaaggaaggagttagaagaggggatttggggatgggggttggaagcgttaacgagatttgttcggaggatttaggttttttgtaggttggtgagtgatttgggagttttgggtaaaagaggtgtatttcggtttagtttggttgttgaattagaataacgcgaggatattaattaatttgtaggaaataaaaaatggaagtcgaggtttaggaagagttgttattttttcgatttgagtggtgtaggttgggggcggagatttgggatttaagagaggttattttttttattttagttttttttttttggatttttaaaaggaataattttattttttttttcgttttttttataatttttattttcgttagttcgtaggtcgtttgttttttttcgtattttttttttttatttagcgagagaaatttagtttttagagt

SEQ ID NO: 153 - DNA, 8252 bp, Artificial Sequence
  chemically treated genomic DNA (Homo sapiens)
gttatcgtggttgggttataggtttattgttttgtggtagatggaagatatgggttttggtaatatattgaaatgttataggaaattaaattagaagtgatttaatttataagtatatttaggtttatttaatatgatgttttaaggtgggtggggggtttaaattagtagtttagggttattaaggttttaggttttgggttttattttattattatataatggttgtttgtaatattatattatatttattttttataatatttaaaggtaggttgtaagggttggtttaggaagttagagggcgttttttatttattaagggagaagtttgttttatttttaaggagatgttttttatgttttatgggttatatagaattgtacggttatttttggttaaaagaggggttgggaaagtgaatttttttttttttttttttcgtagagtgtaagttaggtaagaaagaacggatggtggatagttaggaaatagttagttacgagatgttgtgtggaaagtttatttttttgatattggagaattgtgggaagaacggataggttatatattagttgggttttgagaatttttagtttttgttttatagtgagttagtaggaatttaaagggtatgggtagattttaggggtttttttattttatttaggggtagagagggtaagacggagtagagcgaggtaagagattgagtaatgcgtttttaaagattgtgattgatagaagttgtgtaaattattatgataaattgaattttaagaggaattggattaaataaagttagtttatttttatttgtaattagtagatagagagtgtaagattagatatattatagatggaaaagaaaagttaaaatttttttgtatatttgagaggtaagaggaggtgtttgtggtttttttgatatatacgtgatatatgtattattacggtttatgtgtgtgttgttgtgtgtagggggtagggggtttttcgtttttgatggttttttttggtgggtgtttttcggttttttaggtttttttatttgttgaacgtggtagttaagggtttgggaatgatttgttagattggttaatgtggaaagagttggtttcgtttagttttgtatttttttttttttttttggaatcgtttggttgtagagagtaggagttttttagagttttcgggggattttatttttagtataattgtgtaacgtgtgtttagtataagagtattagatggagggataggtgggaggaggaggaatttagggtgtatttagtttggggtttgttgagttgaggtttttagagtaaggacgattaggttggggggatatttttttttaatttttgttaagttatagaggggttagtgggaataaagtgatattttggtttttgtattttttttttgttgttttattttttagttcgtttagatttgaggttggggaggggtttttttggaggggttagtttatgttattttttgtaatttttattatatatgtttttagatattttgttataggttttattttttacgttaatttttatttgggaaagtaaataaacggaaagttaatttgtgttatttggtcgttggggtattcgtagtgagtagttaagaaatgttaggggagtcggtgtttatttttatgtttggataagagtgcgttttggatttgcgttttgttgtatattttatcgtttcgttgtatattttatcgttttattgtatattttattgttttattgtatattttatcgttttattgtatattttattgttttattgtatattttattgttttattgtatattttattatttttgttttttgtatttagttgtttatttgtattttagtttaggaagtttagaagatgtagaatttttgcgagagtttagggtgaaacgttgcgttttatttttaaagaaaggaaaattatttatattttttaaaagaatgaatagtatagattaatatcgattttttttaatttttaggttaattttgagtagttaaagttagagtagttaatttgtgttgtgagtcgaggtatagttgtagaagcgtgtttgaggtgttcggtggaggtggtagtcgagttttgggattaattatcgtgttggggacggtatcgcgttaggatgtaggtagatttttgtagaagtgtttaaaatttatatttttttataggggtgagggggagggagaaagagatgttttagtgaggataaatatttttttttatatttaaataattatagagtttttattttaaagtatttataggtatattttttagaaaatatgaattgttagtcgggtacggtggtttacgtttgtaattttagttttttgggaggttgaggcgggtagattatttgaggttaagagtttaagatcggtttggttaatatggtgaaatttcgtttatattaaaaatataaaaaaaatttagttgggcgtagtggtatatatttgtaattttagttattaggaagttgaggttgaatttaggaggtagagattgtagtgagttaagatcgtattattgtattttagtttaggggtaacggagcgagattttattttaaaaaaaaaaaaaaaaaaagaatatatgaaatgtttttagatttcgttatgttttttttttttattttaggtaagttagaaagcgttattaatagtggttttttttaggtttttggttagagatgtgaagagaagtcggggggaaattaggtttttttttaagttttttagttttgtttttttatttttggatttgaatgtagtttgatttaggttattttattgtattattattggcggtcgtgattttgtgtaaaggtatagttggtgatgttgattagagtttttgtagttttaaatgatttttttaattaattttaaatttttagaatttatcgtataaaaaggttatattttttggagggacgtcgatggtattaggatagaagtattaggggattttacgaacggtgtcgtcgaaatagtagtttttatttgtatattgggagggcgtgatattaggaaaattataattttgttttttacggggggttattgtatacgtttttgaaagtgtataggtaagaagtaaagtaagttgtgggttgaattttttgatgttattatgtatatatttatttagtttttttttttaatgatattagtaattgtttagtgaggcggatataaaatttttaggatatgagagggagacgtggtttttatattttgatgtgtaaatattacgtttagggaaaatgtaaggtgttttaggtttgtggattttgtatttttttaggtaatttatttatttattttttaattttaataaatgattattaaattttatttaatatataaatatttattgagtattatttgtgtgtatgagaagtgggagttagtatggtaaaagttaggtattgtgttaggtgagagagatttagaaattaaaattagagaagttattaataagagtttaaatatttgggtttaggtttatgtttgtaattttagtattttgggaggttgaaggaggtgaattatttgaggttaggagtttaagattagtttgattaaaatggtgaagttttatttttattaaaaatataaaaaattaggcgggtattgtggtatacgtttgtaattttagttatttgggaggttgaggtaggagaattatttgaatttaggaggtagaggttgtagtgagttaagatcgtattattgtattttagtttgagtgatagagtaagattttattttaaaaaaaaaaaaaaaagagtttaaggatttgatggaggagaaaggtaagaatatgtgcgagataacgtaaggttatcgttttagggtgtttagggtaattacgggggtagggtatttttcggagaggttaatgataagtaggttgaataaagtaggggggttttttgtaggaggaggtttattaggtgaagatggagtcgtatgggtaaaggttattttagagatttaggtgtgtttaggaggtggaaatttattgtaggtaaggtgagaggatcgggtggggtggtttaggaggagtcgatagagggtataagttgtgaaatagtttgaagtagggtagtgaggaaagggatttagaggaggaagatacgtggatagatggggttggttgggggttgtcgtaggattttatgtaagaggttttaatattagagttttaggttttgagtttcgcggaattaaaggttttagaaagtaatttattaggatttggtggttgatagtttgtagtagggggtgaaagaggagtttagagtatttttcggtttttgtttttgttttggggtataggaggggaggaatttagtttggttatattggtttaggtgagggcgttttaggggaggtcgagaggggttgtttttttgtttgttttgttattagggattgtttcgagatgtttttggagaaagtgtttttggtttgttgggaaggattcgtgtttagttttcgttgtttagtagtttttatgggaattttgtttttttggggtttggatttatcgcgacgtgaaggtgattatcgtttattttcgggatattgtgggggttaagagaggtttcgtggtgagggaggattattattttgggggtcgggggggttttttttttagggaggaagatttttagtttcggtgttttgttttcggtagattttgttttgtttattcgttttgtttttgtcgtatgatggaaataaatggaaatggtttttatatacgaatgtattaaattgtaattataattttttagattttagttgtaataggattatggatttgagtgattcgtaaagacgttttgagttttgagttagagggtgtgtggggtggggaggggagtttgttacggtttttgtgattttatagtatagggggtagagttgggggttggggtgggggtaagggcgtaggtagatgggtttgggggtggttagtacggggatttatttagttcgttttgtatatcgaggttattttttttttcgggttttaaagttttttcgttttttgttatgggtttgggggtttttttattgtagtttaatgttggttgtttttttacgttgtttaagtttattttttaggttcggtattttatagtagagattaagaggtggttggagggtagtgggggtacggatagtattattgggcgttttttttttaggtttttttggaaatttttgttttggaaacgtagaaagtttttttttttgtttttattttgaaattgtatttaataacggtaaataagttatttagttttttatagttggtaaagtgtaagtcgtagatgttgttatatagtattttttgatagttttagggtagatcgttgatttattttgtaggtaaaggagttgagatgtaaatattttttaaggaagtaagaatggtttttttttttattttttagaaggatttagggtaatcgatttatttgataatattagggaatatgggttgttagttacgtatttatgagagaggtggttttgatttttagagtatggattttaggggagtttaggaatttgtaggagagggttttttagttggttattattgggacgggtattcgggtttgtgggagagggttttttaggtggttattattgggatcggtatttgggtttatttggatgggttttgggagggtttgtttttgggggagatgttggtatgaatagttaaaagtattattttgagattttacgttaatattttttttttgaaatatgatatttgggaggattgtatagtttttttaatataggaaaatagtttcgattgaaggtagtttttttttcgtcgtatttttcgaaggttttcgggggttttgttattttgagttattttttatttgtttttgtcgattttgtaaattggatatatttttaagggtttagaatagtatttggtataaaataggtgtttaaaaatatgtatgtaaaatagtggtttttggcggaggttgttagagttggttgtggttttatagagtaggaagaagtacgttttatttgtttgggtttcggttagggtgtcgagggttagtatggatattaggattagggcgtagattattttgttttttatggtggttattgttttttttttgttttaaaggcgatttcgagttagggatgagaggtcgttcgagtttcggattttatagggtaggttttgtttgtttaaagagcgttagataatatttgtttaaggaggttcggggattttttgagataataatttttattgatttttattaaaggtgttttttagatatggttaagttatatggaaggatttgttgatagatagagacgatatgtggtgaggttattttggttgagggatttgagatttagaaagttttttttttttatgggagttttttttaatttgattttaatttaggttttatttatatttgagaggttttttcgttagggtaaatattgtatttattgtagaagtgatttatagtgagagatggtcggaaaaaggtttggtcgtgataatagtggtttacggggtggttatcgtgattttgtagggggaagggaaggagtttatgaagtttatttcgtttaggtttaagttaatttttttatagtggaattgttttaataatgaaattgtaggtttggcgtagtggtttacgtttgtaattttaatattttgggaggttaaagtaggcggattatttaaagttaggagtttgagattagtttggttaatatggcgaaatttcgtttttataaaaaaaaaaaatataaaaattagttaggtatggtggcgggtgtttgtaattttagttattttggaggttaagttaggagaattatttgaatttgggaggcggaggttgtagtgagtcgagattattttattgtattttagtttgagcgatagattaagtttttttttgggaggggttgggggtaggagggagaaaaaaatagtatatacgagttgttattaaaaattgataaagtgaacgtggtttatttttttgtgtttatggggtttttttttttttttttttatatttttttagttggttttttggatttttgtattttagaggatagttttttgtttttttgtattatgttttattttttttttttgttcggagtttttttttttatagtttttattattttttggtggataaaataagtgattgatatattatgttggttatttatttattgtatttttttttgtagtagacgggagggcgtatgggagtagaagtttttattttttagtgttttgaggtggttttagattttagaatagtggttttgattggtattcgagaaatagttgttgaagagttgtatgaagaaatggataataggagaaatttttttttttttagtgagaaattaggttttgaggaaaatgtatgttagtttaataaaggtattatttttttttgggtgatttagttagtatatttttgtagtttttttgggaggggagtttgggttagaatgggggcggttatgttttttttcgttttattttaggatttagttttttttttagggttgttatttttgtatcggggtttttatttttgggttagggtttttaggaggggtttgatcgtaggatttagggaggggtcgaggtttggtgttttttgtggttagtttaagtttattgaaaataggacgggggtattaggtttagggtggtgtttatagtgacggtggttttcgttgttttaatttttcggattaaaatgggggtttttggaaatgggatgtaaattgtataattatttggagaaaaggtgggtagtgttcggtgaggtttaagttatatagattttatagtttagtaaatttttttgtttttaggtttggttttttaattttagaaatatgtttatatttgggtagaagaaaatataggtaaagatattttttttagtattgtttgtaatagttggaaatagggaaagaaggaaggaaggaaaggagggaaagaaaagtaaaataaatatttattaattagggaaagggaaaatgaatttaaaatataatgtagtcgttttttagtatttttgggggattggttttaggattttttatttagggatgttaaaatttataaatgtttaagttt

SEQ ID NO: 154 - DNA, 8252 bp, Artificial Sequence
  chemically treated genomic DNA (Homo sapiens)
ggatttgagtatttgtggattttggtatttttgggtggggggttttgaaattagttttttaggggtattaagggacgattgtattgtattttaagtttattttttttttttttggttaatgaatatttattttgttttttttttttttttttttttttttttttttttttttgtttttagttgttataaataatgttaaaaagaatatttttgtttgtgtttttttttgtttaagtatgaatatgtttttgggattaagagattaggtttggaaatagaagaatttgttgagttgtaaaatttgtatggtttaaattttatcgaatattgtttattttttttttaaatgattgtgtaatttatattttatttttaagagtttttattttgattcgagaaattagagtagcgaaaattatcgttattatgagtattattttgggtttggtgttttcgttttgtttttaataaatttaagttgattatagaggatattaggtttcggtttttttttgggttttgcggttaggttttttttggagattttggtttaggagtggagatttcggtgtaggagtggtagttttggaggaggggttgggttttgggatggagcgaagaggaatatggtcgtttttattttggtttaggttttttttttagaggggttgtagaaatgtattgattaggttatttaagaaaagatagtatttttgttaggttagtatgtattttttttagggtttaattttttattgaagaagaaaagattttttttgttgtttatttttttatgtagttttttaatagttgtttttcgaatgttaattaaagttattgttttagggtttggggttattttaaggtattaggagatgaggatttttgtttttatgcgttttttcgtttgttgtagggaggagtgtaatgaataaataattaatataatgtgttagttatttgttttatttattaggaggtaataagagttatgaaagagaaagtttcgagtaggggaggggagtgaggtatggtataggagagtaggaggttgttttttaaaatataggagtttaggggattaattgggaaggtgtgggagggggagggagggagttttatagatataggggagtgaattacgtttattttgttagtttttgatggtagttcgtatatattattttttttttttttttgtttttagttttttttagaaggagatttaatttgtcgtttaggttggagtgtagtagggtgatttcgatttattgtaattttcgttttttaggtttaagtgatttttttgatttaatttttagagtagttaggattataggtattcgttattatgtttggttaatttttgtattttttttttttgtagagacggggtttcgttatgttggttaggttagttttaaatttttgattttaagtgattcgtttgttttggttttttaaagtgttgggattataggcgtgagttattgcgttaggtttataattttattattaaaataattttattgtaaaagaattagtttaggtttagacggaatgggttttatgagtttttttttttttttttgtaaggttacggtggttatttcgtgagttattgttgttacggttaagttttttttcggttattttttattatgaattatttttgtagtgagtatagtatttattttggcgggagggttttttagatatgagtaggatttggattaaggttaggttggaggagatttttatgggaaagagggattttttgaattttagattttttagttaagatgattttattatatgtcgtttttgtttattagtaaatttttttatgtagtttgattatgtttaggaaatatttttgataaaaattagtggagattattgttttagaggattttcgggtttttttaggtaaatgttatttaacgttttttaagtaaatagagtttgttttataaaattcggggttcgggcggttttttatttttgattcggggtcgtttttggagtagagaggaggtaatggttattatggagaataaggtgatttgcgttttggttttggtgtttatgttggttttcggtattttggtcgaggtttagataggtaaggcgtgtttttttttgttttgtggggttatagttagttttggtagttttcgttaggagttattgttttatatatatatttttgagtatttgttttgtgttaggtgttgttttaggtttttaaaagtatatttaatttataggatcggtaaaagtaggtggagagtaatttagggtggtagggttttcggagattttcgagaagtgcgacgaggagggggttgtttttagtcggggttgtttttttgtgttaggaagattatataatttttttaagtgttatgttttaaagaggaagtgttggcgtggggttttagaatagtgtttttgattgtttatgttaatattttttttaggggtagatttttttaaggtttatttagataggtttaaatgtcggttttagtgatggttatttgggagatttttttttataggttcgaatgttcgttttagtggtggttaattgggagatttttttttataggtttttgggtttttttgggatttatgttttgggagttaaagttattttttttatgagtgcgtggttggtaatttatattttttggtgttgttaagtggatcggttgttttgggtttttttagggagtggaggaggaggttatttttgtttttttgggaagtgtttgtattttaatttttttatttgtagaatggattaacggtttgttttagggttgttaggaaatgttgtgtggtagtatttgcgatttgtattttgttagttgtggggagttgaataatttatttgtcgttattaggtatagttttaaggtgggggtaggagaaagggttttttacgtttttaaagtaagggtttttagagaggtttgaagagggagcgtttagtggtgttgttcgtgtttttattgttttttagttattttttgatttttgttgtggggtatcgggtttgaggggtgggtttgggtagcgtagaagagtagttagtattgggttgtagtgggaagatttttaagtttatggtagggagcgggggagttttggaattcgagagaggaagtggtttcggtgtatagaacgaattgggtgggttttcgtgttggttatttttaggtttatttgtttgcgtttttgtttttattttagtttttagttttgttttttgtgttgtgggattatagaggtcgtggtaaatttttttttttattttatatattttttggtttaaggtttagagcgtttttgcgggttatttaggtttatgattttgttataattgaaatttagaaaattgtgattatagtttagtgtattcgtgtgtggaaattatttttatttatttttattatgcgataaagataaagcgggtgggtaagatagagtttgtcggaggtagagtatcggggttggaaatttttttttttgaggaggaaattttttcgatttttaggatgatgatttttttttattacggggttttttttgatttttatagtgtttcgggggtgggcgatgattatttttacgtcgcgatggatttagattttaggagggtaaggtttttatggaagttgttgggtagcgggagttgaatacggattttttttagtaagttaggaatattttttttaaagatatttcgaggtagtttttgatagtaaagtagataagagaatagtttttttcggttttttttggggcgtttttatttgagttagtgtggttagattgagtttttttttttttatgttttaaggtagggatagggatcggagggtgttttgggttttttttttattttttgttgtaggttgttaattattagattttaataggttgttttttgagatttttgatttcgcggagtttagagtttgaagttttggtgttagaattttttgtataagattttgcggtagtttttagttagttttatttgtttacgtgttttttttttttagatttttttttttattgttttgttttaagttgttttatagtttgtattttttgtcggttttttttagattattttattcggtttttttattttatttgtaatgggtttttattttttgaatatatttgggtttttggaatggtttttgtttatgcggttttatttttatttggtgaatttttttttgtagggagtttttttgttttgtttaatttgtttgttattggttttttcggggagtgttttattttcgtggttattttgggtattttgggacgatggttttgcgttgtttcgtatatgtttttgttttttttttttattagatttttagatttttttttttttttttttgagatggagttttgttttgttatttaggttggagtgtaatggtgcgattttggtttattataatttttgttttttgggtttaagtgatttttttgttttagttttttaagtagttgggattatagacgtgtgttataatgttcgtttaattttttgtatttttagtagagatggggttttattattttggttaggttggttttgaatttttgattttaagtgatttattttttttagttttttaaagtgttgggattataggtatgagtttgggtttagatatttagatttttattaatgatttttttggttttaatttttgggttttttttatttggtatagtgtttggtttttgttatgttagtttttattttttatgtatataaatggtgtttagtaaatatttatgtattgagtaaaatttaataattatttgttgaaattaaaaagtgaataaataagttatttagaaagatgtaaagtttataaatttggggtattttgtattttttttgagcgtaatgtttgtatattaggatgtgaggattacgttttttttttatgttttgagggttttatattcgttttattggatagttgttgatgttattggagaaggaagttggatgggtgtgtgtatgataatattaaggaatttagtttataatttattttgttttttatttgtgtatttttagagacgtgtatagtggtttttcgtgaaagatagaattgtggtttttttggtgttacgtttttttagtgtgtaaataagggttgttgtttcgacgatatcgttcgtggggttttttggtgtttttattttaatattatcgacgtttttttagaaggtatggtttttttatacgatgggttttgaagatttagaattagttagaaaagttatttaagattatagaggttttgattagtattattagttatgtttttatatagagttacggtcgttagtggtggtgtaatggggtagtttgagttaggttgtatttaggtttaggaatagaaaggtagggttaagggatttgggaagaaatttgattttttttcggtttttttttatatttttaattaaaagtttgggaagagttattgttggtaacgttttttagtttgtttaggatagagggggaaggtatgacgaaatttgaagatattttatgtattttttttttttttttttttttgaaatggagtttcgtttcgttgtttttgagttggagtgtaatggtgcgattttggtttattgtaatttttgttttttgagtttaattttagttttttagtagttgagattataggtgtgtgttattacgtttagttaaattttttttgtatttttagtatagacggggttttattatgttggttagatcggttttgaatttttgattttaggtgatttgttcgttttagttttttagagagttgggattataggcgtgagttatcgtgttcggttgatagtttatgttttttaaagaatgtgtttatggatattttaaagtaaaaattttgtaattgtttaaatgtgaaagaaaatgtttatttttattaaagtattttttttttttttttttttatttttgtagaggagtgtgaattttagatatttttgtagggatttgtttgtattttgacgcggtgtcgtttttagtacggtgattagttttagagttcggttgttatttttatcggatattttagatacgtttttgtagttgtgtttcggtttataatatagattgattgttttgattttgattatttaaaattggtttaaaaattaaaagagatcgatattaatttgtgttgtttatttttttaaagaatatgaatgatttttttttttttgaaagtgaagcgtagcgttttattttgggttttcgtagaggttttgtattttttgggttttttgagttgggatataagtgggtagttgagtgtagaaagtagggatggtggggtgtatagtaggatagtggggtgtgtagtaggatagtggggtgtgtagtaggacggtggggtgtatagtaggatagtggggtgtgtagtaggacggtggggtgtgtagcgggacggtggggtgtgtagtaggacgtaagtttaagacgtatttttgtttaggtatgaaaatggatatcgatttttttggtattttttaattatttattgcggatgttttagcgattaagtgatataagttagtttttcgtttatttgtttttttaaatagaaattggcgtaggagatgaaatttgtagtagaatgtttgaaagtatgtgtaataaaaattgtagagggtggtatggattgatttttttaggaaaatttttttttaattttagatttgaacgaattagaaaatagaatagtagaggagggatatagaagttaaaatgttattttatttttattggtttttttgtagtttggtaaggattgggagagggtgtttttttaatttagtcgtttttgttttggggattttagtttagtaagttttaagttaaatgtattttgggttttttttttttttatttgtttttttatttggtgtttttgtgttgggtatacgttgtatagttatattggagatgggatttttcgggagttttggaaagtttttgttttttgtagttagacggttttagggaggaagagggaggtgtagaattgagcggggttagttttttttatattaattagtttggtaaattatttttaaatttttggttattacgtttagtagataaagaggtttgagaggtcgggagatatttattaagaagaattattaggaacgggaagttttttgttttttgtatatagtagtatatatatgagtcgtaataatatatatgttacgtatgtgttaggggggttatagatatttttttttattttttagatgtgtaaggaagttttagttttttttttttatttatggtatgtttgattttatattttttgtttgttaattataggtaaaaatgagttaattttatttagtttaattttttttaaaatttagtttgttataataatttgtatagtttttgttagttatagtttttgggaacgtattgtttagttttttatttcgttttatttcgttttgttttttttatttttgggtggggtgaaggagtttttggggtttgtttatgttttttggatttttgttggtttattgtggagtagaagttgggggtttttagagtttagttggtgtgtggtttgttcgttttttttatagttttttagtgttagaaaggtgggttttttatataatatttcgtagttgattgttttttggttgtttattattcgtttttttttatttaatttgtattttacgaaggaagggggagaaagaatttatttttttagttttttttttagttagaagtggtcgtgtaattttatgtggtttatgagatatagggggtatttttttgaaggtggggtaggttttttttttgatgaatgaagagcgttttttggttttttaggttagtttttgtagtttgtttttgggtgttgtggaaggtgggtgtgatgtggtgttgtaggtagttattatgtaataatgaggtaaggtttaagatttagagttttaataattttgagttattgatttgagttttttatttattttgagatattatgttaaataaatttaagtgtgtttgtgggttaaattatttttggtttggttttttgtggtattttagtatattattaaggtttatattttttatttattatagagtagtgagtttatggtttagttacgatggt

SEQ ID NO: 155 - DNA, 28536 bp, Artificial Sequence
  chemically treated genomic DNA (Homo sapiens)
gttttgggagttaggttttttttgttggatgggaaaaggaggtgtggaaaggggtaggtggtttgtgggttagtggggatgagagttgtggggagaatggaggagagagtaaaattattttttttggaagtttaagggaagggagttgaggtgagagaaatggttttttttaggttttaagtttttgtttttagtttgtattatttaagttggggaagtgataattttttttaaattttgatttttattttttgttttttgtagattgattgatgtttttgtgttgttttagtttagtaattaaattaggttgaggtatattttttttatttagagtttttaaattatttattaatttgtaggagatttaaattttttgggtaggttttgttagtgtttttagtttttatttttaaatttttttttttagtttttttttttttttttgttttttggttttttttgttttttattaggttgagaggtggagaggttgggattgttgggttttgtggttttagaagttaaagtttgtttgtggggattgtttttttttttattgtttttaagtgaataatatggtgggaggtgatttttgtttaaagggtttttatttgttttttattgttgtgtgatttttttgtaagttggaggtagagttttaaaaagaaagaaagtgtgtgttgagtattgattttaaattggggatattatttgtgatttttttaagtggtagtagtagttttttgtagaataaagatttagtgtttgagttttaaaagtttttaggtaaagttttatttagatgaaagtaattaaggtgaaaaaataatgatattgttggttttagaaaattggtggttattttttgttttaagttttttagtgtggtgtttgtttttgtttattttggttgtgtggggggttgataagtataataaaagattttagtatatttttttttttatttttataatgatttttttagtgttatgaggatgaattttttgggattaagtggtatttgtttttatttgttatgaaattaaattttatatttttttaaagttgaaaattgtggataaagaaggattgggtgtttaaagtttatttaaatatttatattgaatttattttttgtttagatgttagaggatggtagggagggttagggttgtaatttattttgatttgttttattgttttgtagtttgtaaattataattttgtataattttaggaataagtaggtttagaattaatgggttaatattatttaaaataaaatattgggagtatgatttttgttttaattatatattgtttgataagatttaggaaattttattttaattttttaatttttgagttttttgagaaattgaagggttgtagttattagaaattatttttgttttttttaatgtttttaaaggatttggaaatagtaatgtaatataatatgaaggatttttttatttaagtttgaagataaatgtggaagtttaaatattttgaattggagatgtttttttgtaaatttattatagatgtattttttttgagagaaatgtatataaattatatatgtatatatgtataaatatttttttagaataatttgttagaggtgtaggtttttttgtaaaggagtaaatttgagagttattttaagttgatggatttgttaaattttttttttttttttttttttttatattatttgttagttataatggaattttttaggtttaagttaaagaaaaattggagagataaaattagattttgtagttttttttttttttgggaatgtttttttttttttttttagtttttgatgaatggttattatttatttttattaaatttaaataaggattgttgttttgtatgtttaattaggtaggtagagggaattggtttgtttaggaagtagtgattgagatgttttggttaagttagtgatagaggaggggagaaagaatttagattaatttgtatgtagtatattttatttttatgaaataaaatatatttgttttatatttgttgaaaagtaaaataataatattgtatgaaatgttatatatagggtaggttgtatatagtagttttagaaatattattgtatttattagagaaattattttaaaattgatatttatatattttttataataataataatatgttagaaatatatagtgtggtatttagtatatatatttttttgtttgtaagtgaaaaattttaattgtttttgtataatatgttttattttaaagtttaatttttaaaaatattgttgtgatattattaataattgtttttataaaattaatttgatattttgatatatatatatttttttagttatttaaatgttaataatgttaaatttaaaaaataataagtttatagtaatgttaaaatgttatatttagttaaatatttgtttgtgtatgtgtttttgtaattgttagaaatatttgtagtgaaagatgttagatattgaggatatttttttgaaattaaaggagttttttttttgatttagtggtttttttttttttatatagtttttttttttttttttttttttagtgtttatgattttttagtataatttttagttttttaagggtggagttgttttatttggtaaggttttaggattttggtgttgtgggtgtggtttatatgggttggtttattgtatattggtaagtatttaggttggaggttgggttttgtatgttggtgtagttgaagttggagtgttgttttgtttttagttttaggttggttaggtttgagttatatgtgtttttataaatatatggaggagttggtggtgtgtaaggataggtaggtgttggtattgtggaatttagtgatgggttatttaggttgtttaagttatttaggttgttgagattggagtttgggatgtttgttattgttgagggtattatgttggatgatatgtttatggatgagatagagttgggtggggaaaatatgttttgtgatgatagggggttgatgtttatagagttgaagaaggggaagtttttggtggatagggaggtggatgtaaggtttttggtggtttagttgttgtaggaatagtttgggtatatgttgttgtagggttgtatgagtttattgaattgtggtttgaagttatttttgtatagtttggtttgttggttgtgttttttttttttttatttggtttgatgatttttgaattaaatttgggggtggttggggtaagggagtaaatagatgttatagtgtagattattaaaatttttattggaggttaatttttgtttttttttgatatatatgttagtgtatttatatattttggttttgttttattgtattgttttgtatattaagatattagggttagtttttagttattggtttgggtttttattaagtgtaggagatttggtttgttttggtttgtgagttgggatttggagttatgttataaattttagttgaatgtatggagatttgtggatggtttgattatttagttaggtgtttttttaggtttaaaaatatttaatgtaaaataaatgtggggtagtaggtttttttaattttttttggggtattttgtaaatttgtttttattttaaagttatagatttatggatgaggagaaggggttggaagggtattagaggattgtttttttttttatgtaattttttttttttttttttgatttttattgttgttttttattttttggtatgtgtttttttaatagggattaggttgttaatatttttttttgtttagtaaaataattaaataaagagtaaaagattatttttttgttagtttgttaattttaggagtttggtatattaaattttgggaatttggaaagggtagttttggagattttttttttttttgttttgttttttttttattttaagtttattataggtttgtttgtgtgttaggtttagttgggttgtttggttttgtaggtggttatttaggttggttggtttttatttgtgtttggtggtttagttgtaattttgattttaatttatattgggtttttttgttgttttagatggtggtttttgtgtattggagagaggtttggtttgagatatttgagttgatattagtgatgttttatattatatatttttgttgggtttagttgtgtaatttgttttttttttttttttttttatttttgattttttttttatttttttttttttttgtatttgattgttataaaaagtatgttttatttttatttggtttgataagtagttgttttggaaggagaggtagttgtaaggagagtttagtgttgtggttataaagtattagggtggagttgtggaatagtgggtggggtgggagggtgtttttgaaggattttagaaaatttatagattttgtttttaattatttgttatttttattttaggttatttaaattttgtttaggtgagaagagtatgtgagaggtttgtttttttgatgtgtaagagagttaatgaaagattgattttgtttaaaattatgttgtttaggatttagttttggttttggatagttaaattaaaattatttttaatttttttttggttttttatttattagtatagttttatgttttgtataaatgttatttagagagtgtttttattttttttgatttgggagagtattttggtttttattttttttattgttgtttttttttttttgtttgttttgttttaattgggggttttattttttttatttagagtatttaattttttttttttaatagtaaagtttttggatgttgtttgatttgtttgattttgttttttgtttttagaattttaataaatttggaattttttattgattagtataaattaggatgttgttattgggttatttatttgagtttatttttgttaatttataaagtatagatttgttataaagttaaggtaagttttttttataaaattatgattataatttagaagagggggtgtgagttttaatttttagagtttaatttttgagagaagataaataaattaagtagaaaagttttttttttttttttttttttttttttaagaggattagtagttgtgtattaaaattttgtttttggagattataaaattaggaaatagggtgtgtgggagagatttgaatggttgaaataattgtaaagaaggtgtaagaagtgtgagtttaggagggaaaaagttgggttagggttgggataaaggttttttagggagggttaatttttttgtgtttttggtgggttttttttgttaaaggtttataggttggagtttgtttgtggtttttggtttggtagggattttattagttttgttttggtaattgtaagttaggaatataatgttttgtgtaggggattgtttatgtagtttagtttgtgagattgtgggatggtggggtagtgagttggtgttgttttgggagtttgagttagggtggtagttttgttggttttggagagggaattgtaattttgtaattaggttgttgtgaggttttttgtttttgtaaagttgtgttttattggtgtttttttaggtggtgttgttttttatatttttttttggtttatttggtttgtatttttataatattttttttttattttttttagattttgtgttggtttttatttggatttgggtttttgtaaggttggtttatatagtgatttttttgtgtgtggatatgtttgggtagtggtttttttggaaagtggtttttagtttttggagttgttggttggtaaagtgagtttgttgttgtttttgttgtttttttttagatgggtttttggtgtttatgtttttattttttttttgttggtttttatttttttttgaaaatgaaatatatatatttttttgttagtatgtttatttgtaatgtggatgttaattggattggtggtagaagttgtggaagagttgggttgtttggtgttggaggagggtgtgtgtggtggttttgggttgtgaggagtgttgtgtttgtggggtgtgtaggtgtaagtgtgggtgtttgtgttttattttttttttttttttagtgttgtatgttttatttatatgtttattttattgtagtggtatatttatttttatagtttgtgtttttaagtatatttatatatttttgtgtagatatattaaattttttgggatgtgtatatgtgtgtggtttatagattttttttttttttgtagaaagtttagatttttatgtggtttgggaaggttaggaaaagatgtggggatttggttgggtattgaagtttgttggtttttttttaaaaaaaaaaaaaaaatgtttttttgtgaagggtatttttgagtggttttaggtaattttttaatgagtggagttttttgggagttgaaagttgagaggaaaatagggatagaggttggtggtttttgaaggtttttgaattaagatgttgggatttttgtgatttaggaaatagaagggaggttagggtatgaatagagagggtggtagaattgtttgtgtttttagtgttttaggagttgggttggttgagggagaattaaagggatgtggggtagttaaaattttggtttttggaagttttgtggggagttaggtgaatgattatttttattatgtttttttttggaggggttgatttttttggggtgagagggagtgggtggtgtagagtagttgagtgggaatgtttgtagggtggtgtggtgttttatttgtggtttttgggttggaggtgttggagatggtgtgtatttttagtttgtgtttggaggagtttagtgattggggttgattgggagttagaattgaagttatggttaatggttggggatggtgataggaagatgaggagatggttgatagtttggtttttgttgtttggtgttttaagtgaagtgggttttttatgtagtttatggatgagggagtgtgatgttttattagtttttggttattgttttgttgagtttttgtagttgttgttgtttgttttgggttgtgttttaggtgtggagtttttttgttgtggggagagttaggggatgtaatttttgttgagtttttaagttaagttgtttttgttttttttggaaggtttaagtgaaaaagtttggagatggaaagttagtgggtaaatgaagatatgggatgtgggtagaagggtattatttagagtgtttttagggagtaggtttttaagttttaaagtgaaataagagtgggtaaagatttttttttttttttttttttttttttaagaatttttttaataaggaaagttaatgttgattgtgttttgtttgttttttttttatgtggtagttttgatagagaagtgttaagagtgatagggataggtaggtgatattagattttttgtggtggtagtagttgttgtagttatgatgtggttttttgagtgtattttttgtaatgtgtatatgtatattttttgggtggttgaataggagttgggttttgttgtagtttagttttaggtatttaggtgagtgatggattagatttgtggttttgtgtttttttgttggtttaatattttaaaattagaggtgggttttttggtgttgagatgttattttgttgtggttttttttagttttttttgtttttgtttttttttagatttttttttgggtgtgattgatgtggttttgtattaattaggatgttttgagttgtggtggagggattgttttgtttgtatttattagtagtgtggggttgggttattgttttgttgtgtgtattgggtttatataggtaagtttttgggaatttagtttttgtttagtttaaggtgatttggtttttagtatgaatttaaaggtgaagagatgaggttaggagttgaaggtttgggagaagagagtggaatggttaagaagagaaaggtataaggattaataagatatttattttttgtgttttattatatttatttttaattttttattttatataaaaaggagatatgttatttaaaattagaaaatttgaaaaatagtaataaattatttttttgattttaaattttttaaatagtttgttaagtgaatgttgtgttaatttgaagaagttttaattgtaaagaagatagagttttgaaaaggtaggttaataaattagaaattgagaagtaaatggatttgttaaaagaaaattattttgattttaaatgaataattgtttggtggtttattttggatttatataagaataaaaagttgttttagattatgttttttgtgatgtttattagtttttagatagaaaatatataatagaagagaaattttaatttagtgtttttaaaatgttgaaagtttatttattttatttaatgttgattaagatatatattttagattttttaaattttttgtatattgtattaagtttgttttaatttgagagagttatgttttaaatttgatttttttgtttattttattattaattagatttaaatttataaagtttgtagaattaataattttgagttaattatatatgaaatatgttttaatgaatttttatataattaagaatgttgttaaataattaattttaaggataatttttaatagttattttttttttttagtgagtttaaggttgttttgagttattaaagtttaagtaggtagaaggggtgtgtgtgagttaagggtgaaaagtttagaattgtgtttaattagtaaaagtaaaattttatttatataaaataaaaaaaattatttttggagatattaattttttatagtattgtttttaagtaaatttaatttttaaagaaattaaagaaagaaatttaaatatatttaaaataatttttgaaagtttttttgttttttagtataggttagttggagaggataaattaattttttttgggtttttgtatgggtgattgttttattatggagttagtgttattatttttgaatgtgtatttgtttgatattatagttaatgatttgtaatgttagtatgaagtatttttaaaatattttttttttgtttttgtttataagattgggaaatttatttgatgtggaataaagtggatgaagtagattataaatatatttgtaatttatgtgttttttttttgttttgattatttttaaattttatttgtaatttttttttattttaaatttgtagtttaaagatgtatatgagaattgttttttagtttttttttattagtattattttattttaagaataatttagttgtaagggaggaatttttttatagtaagttttaaattagtatttttgtttttaattttttattttattttattttattttatatatatagatatttgtttagagtaaaatatatttttatgtgataggtttgtattagttgaggtttatatatttagttatattaggttttgtaattttattattaaattatatatattatattagtagtttgttggtaaagaaggttaaattaatttatattttgtttattatttggtgtttaaatgatgtattttattttggagatttggtggagaattttttttttagattttatagtgttttattgaagataatgtttttatatttgtagtggtttttaatttgataagattttaatttgtttaagttttttaaataagggttttaaatgtttttagttgtttttttattgaattttttttaatttttttaagattataaagtatatgtgtaaagtaaatatttttttttattgtattgttagttgatgatttataattaagttaataagaatttagtttttttttgttgaatgtgtttattaattatattttagtttttttttttaaattttagaatagttgtggtttttataatattatgttttttaaagttttattttatgaagggattttattatattaaagaatgaaaaaaatttttattgtagttagtatatatagttttttattttttgttttttaagatttaaattttagagttgtaaatatttttggaagtttgggtgttaatgttttattttagaaagttgagaagttttatagagttatatagatttttaaatttattttttataaatttatagaattttgataaaagttttggtggttttattttattgatggaatttttattatgataaatatatatgtatgaaggattttaattagtttttaaagtggttgaaaaatttaagggtatgtgattgttttttatagtgttaatgtgtgtgagatgttggaagtattggggattagtagtagtttagatgtttaaaaagataaggtgttttaatttgtgtggatttattgaagttaagtggtgaataaagataattatttagataatttagattaaagtaaaagtaaaattatatttatttgtatatatatatttatatttattttatattatagatatatatatgtatatatatattggttttgtaaataattgatttaaagtgaggattttttttgtatttttttagtaggagttttaatatttttttaattttttaattattttatatatttatagtagtggtgattgggtgatattttttttaggttttttgtgtggtaggatattaatatgataagtttgtatggggaaaaggaggtatgtggtgggaattaagaaatattgtttagtgaaaattttgtggtatggtggtggttgattttggagatttaatgtatataagatttgtgggtgtataggtataggtagtatggatgagaaaggggttagaagaaaataaattttatgtattttgtgattttagtattattgtgatttttggttaagttttttttaattggttttagaaattattatgagtttagtttttaatatagaaatttttaatatggagaatattggtgggattttggtagggaaattagaggtgttgtatggtttatgtggggtaaagaaggaaagtttagtgttggtgtgaggttttgagtttgggagatattaggggttgttttgattggggttttttgtttatttttttaaagaaagattttagaggagggaaatgtgtgatatggggttagttgtgttttgtgttggtatttgttattgattattagttttaaagttttatttaattttatattttttagtgttagttgtgtaaagtttttttggttatggtagtgagtggttgggttgtgttgttaaattttttgtattaatttggtttgggatttaattaagtgatttttgatttttggaaagagtttgtttttagagtttatttagaagatggtttaattagatatttttttgagttgttaggttttagatgggtgggagttttgttttgtttaagttagtttaaggatgaggtttgtttggatttagtttggagttatgtgatgggtgtgagtgtgtgagtttttggtaaggtgtagaggttagatggagattttgtattttgtttgagaagtgttttattttttttaatatttggtttttttttgtatataaattaagttgaaaatagtttattatttattattttttatagttatggaattaaataatttagaaattaaaagttttattgtagttgtttttttttttattttttaaatggaatttaaaaagttttggtttgttaaaaggggaagattattttttgaattggaagtttgtagatatattgagtaatagttattttttttgggtttttgtaaatggtatttatttttttaatttatagttttagttgtttaattatttgagatttggggtaattatttgggggaatagtgtttagatggtagtgggagttattattttatagtggtttggggaagagaagagaaagagattagaggagggggtatttgttaaaattatttaatgaatatgttgttaatgtttttttatatttgtatgttattgttatagtttttttaggtgttattgagtttttagaaagtaattatttgttgaattaagtaaaataaggagaatggtatagtatatgtgtttggagaaggggaaggaagggtggaatatgaaattgagtatagatatttaggttaggaaagaaggaagtggtaaggggttaaatgaagttttatttttttgttatttttttaaataatagttggattaaatatttatttgtttttttttttttttttttttttttttttttagtttatgtttattttttttttttattttttttgtttttttttttttttgtttttttttttttagatatgttggtagttaatatttagtattagttgttatggtgattataaattatttaaatttaaaaatatttatttataatttgagatgaagtttttatttttttagtgaaataatattttaaaagttgttagttgataaaaaaaaaggaatttattttattgtagtaatttaagtaatatattatttttaaaggtttaaattaaaatgttagtttgttaaaaatatgttggtagagttttggatattttttttgttagatttttataaagaagttgattttgttatttttggttgttttttaatatatatatataattttgtatgttttttttttttttattaattttttttttttttattaattattttagtttttaaagattttatgtattgggttttaaaagaaaagaatttttttttggattagaaaatagttttattggttgttgaagtgaaagatgtggggtttagggggaaaggttattaggattataatggtggtggtggtaggaggttattttagaggagttaagaagaaaaaaaaatgtagggagaaggattggaggtggaaagatagagtaatagaaaattgagttgggtggttaggtgttgtggtgaagtttagttttgaaatgataggtatatatttttttatttttgttttttttttttttgagagaaaatttttttagttagagattttggggggtaggaggtgggtaaatgttgttgtagttgggttttttgttttttattttgggtttgttgttttttgtttattttggattatagggtatttgtttagatgaagagttattaattatttatttagttaatattaggaagatgataaagttttttatataggattaagaagatattagattgttttattagtatatttttgtttatgaataagtttttgttatatattttttttttttttgagttgttttaataattgttgtatatattagtagtgggtggtgaggaataatagttgaattagttttaagaaattttgtgtattgagttagtagtgaggaatgtgatttgtgaagattatttttgtgggtagggatttgtagggattgattatttttggataattggtataattttttttgggggtgaaaaattataatgtggtggggtattttttaagtgagttgtagatttgattggtgtggggggtgggggaggggaggggagaatgggatggtggaggttgggtggaggaaagaaaatggaaaattttttttatttttattttgttgttttttttttaagttttatgttttttttggtaagtatttgttttttttgtgttagttatagttagagttttttatttttttttatatatttttttttttttgataaggtttaggattttggttattattttatgtattattattttgtgttttgttagagatggtttgggttgattttgttggtgtttatgttaggattaaaatttttttatgatggtgaggaaaattgtattatttgtttttagggggtatattaggagtttatgtagtatatgttttgtaaatatttgttgattgaatgagaggtgtgggggtggggtggtggagaggggtttgtggttgttaaggttgttagggttaatttaggttttttgaagaaggttgggattgagttgttgttgtgtgtgaaggtgtgtgttgtggttgggggtgttataatgggttatggagtttattttttagagggaggaagtttgtgtatattagtgatttgggttgaatatttttagtttatttattgggttaaagttatttaataattaatgtgtttttgggggaggttgggggaagtatttgttttttgttgggatgtaaagttaggtgttaggtttaaaggggttgtagtgtagtttgattttagtatggaatttagagttgttgttttgaaattttttaagttagtgatagaggagggttagtttgttttttttttgagggtgaagattattttatgagttttttttaggatttttaaagtaagaaaagttaaagaaaggtttttttgttttagggggttgtttttagttggtttttatattattttttgttagttgtgtttatttttttttaaatttttggtttttaggggtttttagttgtttttgtgttatttttgttttggggttttatttaggttgggtatttgtttaatggatattaaggagaatgggatttattagggaaggaaggtagagtttggattgtttagaggtggattttgtttatatagaatgtttagtttttaatgaggatatggtatttttgggtggtgttgggggtagaggtggagagggtagtgtaatagattattatggttttttgaagaagttatatgttattgtgaattttttttttttttaaaagtaaagaaaaattttaaaaaaatataagaaataaatttttttgttttataagtaggttgtggttaggattttggatattttataagttaatttaaaattagggaaggataggtgttttattttttagtagtgttatagttttgtttatttgtgtgatttttttttgttgtttattagttttttaaaagttaattaaattaagatttttagtatttttttttattatatgtttttttttaattaatggtattaaatgtgtttaggtagtaatttttttttttggttaaaaagtagaaaaagatatattgagtgtaggggaagagttttttatgtgtattaaaataatgtgggtttgaaagtaatggttaagaaagtaattatttattatttttagttttttatgtgttagttattaaaagtgaatgattaggggtgtttgtgtggtttgtgattggtgtaagtagaatttttttgtttttagttgttttttgtttatttatgaggattttattttattgtaggtttttttatttgtttttagaatgtattttttatgtttaggaaatttggggtagggattgggggaaggagatattttgtgtttttttggtttttagtataataagaaatgttagttttggtttggtgattgtgagtttgttttgtgtgaagtgagattggggagtttttttagtttggttggagttagggttgagtttgtgtaaagtattttttttagaagttattgttgtttttgatttttaattatattttaaatatattatggtttaataatttatttttattattgattattaaatagaagaagaatttaatataatttaaatgatagaaattatgtgatgttatttttgtattgtttttatttaattttatggggttaattttggataagtgagtgtttaattggtttagtagggtgattggtggtgtagtgtagtgtttgggtgtgaagtattggattgttttagatgttttattttaataaatgattatttttttttagatttatggggaaattttaatgtaagatttttgttttttttttagtaatatggtttgtttttttgattggggttttaaattgtttttttttattttatattatatttgtatttttatattttaatttggaaagagggggttaggggttgagggttgtgggggggggggggttttatttgtttatattattaaaggttaatagttttttaaggttaggtatttatttattatggagttaggaaaatagaggaatagtaaatttgaggggtttttttttatgtatttgaaaagaaaggtatttttttttttttattttttatatttttttttttgttttatagaataagttttaatttaggaaaggtttgtggtgtaggttggagattttttaattttttatataagtttgtagattttttttggtaatgttttttgatttttttagagtgaaattagttaattaagtaatgatattgttaaaatttaaggtttggtaattagtattttaggtaggtttgtgttgataggggtaaatttttattttattttgggttgttaagtatagtggttgttttttagttttttagggatgttgttggttttttgttttttttttaattagttaaagtaaatttttgttaatttaagttttttttgtttgttttttgtgatgaattgtgtatttataagtttgggtggggtgtggttgagagtttgagtgattgagtgggttttggtggtgttgtgtgtagtgggatataatgagtgatagaggttgttgttggattatttttttatgttagtttagatgttgaggtttgttggagtgtgtgtaggggattagattatagggagtgagtgagagggagagagaggtgttgggttttaggagtgtagtataatttggggaaaggaattaatgtttttgggatggttgttttttgttttatttagaggtggagtgtttaagtttaagtagtaggtgtgttaggtttggtggttttgtttttttgtgttttgtttgaggtttagagttttggaggtgggtgtttagtgtgtggtttgtgttttttttttggttttattattggtgttaggatgttgttgtgggaagaatttgttgttggttgtttttttttggtttttaggagagtttgtgaatttgatttttttgattttggagtttttggagaagagatatttaatggttgttggttgtatgtttgggttatgtgtgtgtttgttttatgtgtggagagaggtgttttggattgtggttgaaaggagttggggatgggaggagggggaggggtgaggtaggttggaggagaaagagggataaagagtaaagatttagttagaggaaagagttgatggtatttttgttttttggattttttggtaatttggggtaggatggtgtattttttttgtgtttttttggttgttggtggttttagttgggaggagtaggttggggggttttggtatatagtgtgttgttgttttttagtttattgttttgttatagggagaggttattggtgatttggttttgattttttttttgtttaggttggttttttggggaagtgttttttgttggggttttgttgtagggttagtgtttttttgttgtttttatgtggtgtggttttttgtttgatgatttgggtaggagaagggggtttttatttaattgtatatatgttgatattagtttgtggtagttggtttttattttttgttatttgtaaaatagaagagaaggaaggttgtaagaagtggtggttgttgagtgagtagggtttagatgagattatgttatattagttgttaggtgtttattgtgtgttaggttttaggtgtgtttttttgatttgatagtttttggttgtgtagtagtatttttagtttagttttgggtttaggatatttatttattaagaggggatttttttttagagttgttgtaaaagtgtttagaggttagaggattataaagttatagtgtgttggggaggttgtggatttatttttaagaattttggtgttggggttaagaatttatttgaatgtaatggtagtgggagtgggtgggtggagaggatttttttttttgggaagttgtatgtaaagattattttttagtgtttgtttattagttggagtttggtaaatatttgtagaatattagtgttaatgtgtttttgttttagatagtagttttttttggttttttgtaattttgaaatgaatgggtttttggtttagggtgttttaggagtgagttgagtttgggttttttatttattaggagttatttttttatatttagttatatttttttttagagatattaatttggttatttatttatttattataaataattattttaaagtatgatttaagattgtagaggagagatattgggtggattgagtgagattgaggagagtagggtaaatgtttttggagggtttattgtttgttaaggatggagaaatagttttggtataattgttatttagtttttttttttttttttttgggtgagttaaattttttttatgtttttaattataatgtagtgagttaagtatttaatgtgtttttttttttttgttataggtaagttgggagaggtgggttttgaggggttttattgggtgggtagaagagttgtggttgttttaaagataagaaaagaaggtttagggttttttaggtttttttgattttagtgtttgtttttttttatgttaattagggtatgttgatgattggagggtttattttgtgtgggtgtggggattggggtgggagtaagtgttgttgggttggtggaggtatagaggtggggtagggagttgtgggtttgtttttggtttgagtattgtttttttgtgttttggttttttttgaagggagttgggttttggggagtttttggttaaggttgttgtttataggaggggttgtttggtgttgtggtgtggggatttagggtggggatggttaggtggtttttttatttgttagtgagaatgtgggtggggattttgttgatttgatttttgtgggtttgtgggtttagaagtagtagtttggtggttttagatttagtgattttgtagtaaaattataggattagtttttgattgagatgtttgtttgtgagatattataaaatttattattatagttttttattaatttgatatgaagtaatatagatgggattttattagtttagattttaaatgtttatttatgataattttggaggaaatttgtatgttattattattttgataattttttttttttatatgtttgaattggttgtattattagttggtagttggagtattgtagatggtaattgtaaatagtttttatttatttattttttttaaagaatgaaatatataaaagaaaaagattgtgttgtttggtgtaaagttagttaattattatatatttttttttttatttttttgtgttttagtgttgaagattaaataaagtaatataaaataaatttttaagaatttatagagttttattttaaggattgaaaagaaggttaaggtgtgttttttagtttatttttatatgtttttgtgatttggagatttattttgtagttaaaatgagttttgagatttgtatttttatgttttatttaatgattaggtttattagaagaattgagtttaaataattggggaagataattttttaaaaagagatttttaatttttgtttgttgatttttaaatttgttttattaagataagttttttgtgagaaatttggttgttagattttggaattggttttaatggttaattttataaattgagatgggagattttttttgatgggaggtagtttttatttttaaagtttatgttttagttggaatgtatatgttaaggatttttgttttggttaatttgggttttatattgtgagtatataaaaagtattatatggttaatggaggatgaggaattatggtaaagtaggtaggtaagttttaagaaataaaataatttgttaaaaaataatttttgatgattattgtaagattgaaagtgtaggaaaaatatagtttgaataattttagatttttttatattttttttttttttatatattttgttattttataataaaatttttaatggaaagtttaaaaataaatagtataggaatatgtgttttaaatgaattaaattgtgaaattagttagtaaattaatttgtagtaagtaattatttaaggaaattaaaatattgtttagtttagttttgtattttattatgtgtatgtgttttttataattaattaatataagtgttttaggaatatttgaagataaatatgtttaatttaaggaataaagtatttaaataatttaagtgtaattttgttgagttaaagtaaaatattttataaatgaagtggttatttaattttttagggaaagtttggttattgaaatgttgtatgtttatgttatattaataaaaatttttaatttattttgtttatgtgttttgtttttttgatattattggtatttgaattttagatggatttttgttaaaatgatattttgtgtgataaaagtatttttagttttgattgatagattaaaataaatgtaaggaaatttttttaaattagattaattttttataaaaatattttagaatgtatgaattttgatatttatatttataatggtaaaagttttttttgtttagtttagtaagataatatttatataaaagagtaaaaaaaaattatattattttatgatagtttgatttttaaattgtttaagaaagtaaagtggttaaattggaaaagaggaatatattttggaggtttagaattgaaaattttttttttaatttttagttggaaaataattttttgtatttatttaaagtgtattttttgaagtgttagattggagttgattggtgattaatttaaaggagttataatttaaagaaatggtgagagtttggtatttaggtttggtttttaggtaatttgtttgggtttgagaggttattaattgttagttaagatggaattttttttttttttttttttttttaatggataataatgggaagggggttaattttttagtagttgaaattttgtatttagttttttattttgagaatgttaatttttggtttgaggatttgtttttgtagtgttggtattgagatttaagggaagatattttgttttaaatgttagttatggtttggttttttttttgattttagtattttgtagattgttagtgtttgtggtgggggatgaaaggaatagggttttgtaaggtttgtttgttgattgtgttattttgggtgaaatttagttttaaaagttataaattatttatggtgaagattttttgaagtggaataaatttttagatttgtattattttatatttttgtgggatagatggtttttatttattggttattgggagagagttgttgtttttgtgttttattgttttttggggtgatttttagtgagttgagtttttggttgtatggtaagtgtttgaaagttgggtttgagaggattgtagggtttttgagggtgttaagttttgaaggagtttatgggtgtattggggtttttgaaatttagttgttattggtagtttttttttgtttttttttagtttttttgtttggttttgtattttttttttttttttttttttttattttttttttttttttttgtttttattttgtgtggggagtgatgtgatgttagtagagattttattaaattttattgtatagtggtgtgtgggtggttggttgagtttggttgtgtggttggtgatttaggagtgagtatagtgtttgggtgagtgttggggggagtgagtaggggtgatgagaaatgaggtaggggagggaagtagatgttagtgggttgaagagttgggagttggagttgggagagtgaaaggagaggggatttggtggggtatttaggagttaattgaggagtaggagtatggatttttattgtggaaaggaggattagaagggaggatgggatggaagagaagaaaaagtaatttgtgttaatttggtagttttaataaattaaagggggagtgttagggtagtggggagatagaaatgtatttttggggagtaaattaggatgggttgggaggaagtgatagggaaagtggtttaagagatggaataaaggataatgtttatggggttgtttgggatgaggtgtgtggagtgtgggtgtgagtgtgtgtgtgtgatttttttttaggtttgtagagttgaggaaagaggttatagtaaagagggattgtggagggaggaaagtgagagattggtagagggtgggagtggaggtgggtgtggtggggatgggagaggatgagtgaagagaaatttagaagaatggagtgagttagtgggagagggtgggagggttatagttgggagtgaatgagttaggtttgttagttggggaaggttgggatgttgggtttagtttagttgggatattgtgtttgaggttaaggtgggtggattaggtatgttgagagtgttggtgtataggtgggtatggttatgtattgatttagtgtttatgaagggtttgtattggataaggtttagatgtttatagagtttagaattttttttgttgtatttatatttaataagtttattttgggttatggatattttattttttaaaatgatgaggttaaggtttttggtgaggatggtattaaattgtatgggatagaagtgggggtgggggagagagttttttttaagtttatatttgtttttgtaaagtaaagagtatgtgaaattatagggtatatttttatttgaaaagtgtgttttatttttgaattttgattttttgattttttgatttgagtaaagatgtgtattttggtagtgagtagaatattttggttttgttttgtttttgagtggaaggattataaatataatttgtttggaggattaggtgtgaaggtttttgttaggtatatgggataatgtttttttaattttaagggtattttgttaatgtatgtttttggaaagtgttggaatatagttattgtttttggatttggatttttttattaatattaatttttgtttgagagtaaaatttaggtttgttattaaaaagatatttttttggtttttaattgagaataaagttttttttaaaagttgtattgttttttttaaattaatatattaatatttgtaattttagaaatatatagtgatttgggagaatgtgtataaaatagatatgtttaaaaaagtttggtgtttaaaattaattttagttattatataggtgttgggttttttttatttttgggggttgtttggaatatgttatgtgtttttttgaattattttgtgttttgaatttatttgagttagtagtaaaaataggtaaataaatttgtttaatttgttttgagtgttaaatttttttattttgaaatagttaatagttgatagatggatttattttatggaaagggttagtttttttagttatgaagaaaattgattagagatttatattttaagttatttttaatttttatgtaatatttgtgaaaatttaaattttttttttttatttagtggaaatttaaagtagtgttatttaaggggagagaaatgagggggaaaatgtttatgtgttgtttaattgtattttttttttgattttgagaatttttatttttggtttttgaaattttgttgaggtaagaaaattaaatttttttaataagttttataattgaattttagttataggatattggaaagtgtagtttgagaaagatatttttatttttgtttattgatgatttttgtagtttttttatttttttgagtaatgggttaataattttttttttttttttttttattttgtagagattaagaggtgtttgtagtagaatggttttgtttttagttggtggtgaggataggtaattttatggaaaagttggaagagaatgagaaaattaaagatagaaagatttagagatttgtggagagatatagggagagggaagggagttgtgttgaaaagatgtaaagatatgtgtgtgtaattttttttttttttaggttttagaggtttgtaaattagggttgagaggaaggggtttgggaagtttatgttttttttgttttttttttgtttggagttttgtttgttagaggttggttaattttagttttggttgttgtagatattgtgttgagtttttgggtttttgttttgtttagtgttagtgtagttgaagtgagtagttggtgggaaatgtaaatggtttttggagaaatagaagatatagaatgatttttattttttttttgagtgtgtggaaggagttggatatatgttttatgtttttaattttttttttatatttttagttatatttttattaaataattaattaatgtttagaattattagggaatatattaggtatgtaattgtagaagtagggtgttggggggttataaattattgagttgatttaagatgtggattttaggttttttttttgttaaagtagtaaaggaagagtgggttttggtgattgtatttagattttgattattttaaattagaagggggtggagggagtgtttaagtaaagtaagtaattttttgttttgtagatgtaaataagattgtagtattaaaggtattagtttttttagggttagattgtttggattgggagtttggggaaggggagatattaattttatgtatttgtgaattttaaggatgttatatttttatataaataattttagtgtggattttttggaatggggggagtaatatttttattttagaatattaaaatattttttttttaaagtgtatattttttttatttttttaaaattttgaattatgtttaaagataatagttttttagtaaattggagtattggattattttttttatttttttttattgatattttgatgatttgattttaatgtgtggggggtatagggaattaaatatagtttataaaattaagtttagatgaaatagtgttggttaagtgggtttagataatttttaatgagaattttaattatatttttttttttaatatgttgagataagtgatagaattgttagaatggtaattaaattggaaagtttagggagaataataattttgtgattaaattggggtaaaattgtggataaatgtggggtgatttttgttaattttttgttatttaagagttaggatttgggaaaggtatagtattattttagagtttgttgtgatgggttgtgtgttattatttattttttttattttggattatgattttaattttggtaagtaatttttttagttttttatttgataataagtgagtatgtaaatattaatggttagtgatgtttaattgttttaaatattattgatttgttggttgttttaaattgtttttttagtttaggttttgtttttgaattgtttattttagaggtttgatttatgtttttgatgttataatataataattgtttttttaaaaaaggtatttaagatgaattaattgatttgtatataaattaaaattattatgtgttgttgattttggtgttttataattattttgaaattagtatttaattatttgagttaaaagaatatataaatgtttgtattgatttattaatgaattatttaattaaaatgtttgggtaatgttgggtgttggaaagattgttaaattaagatatattataggagggatatgaagattagaaaggtaatagattaatattttgtatttaaaatggagtttttggtgatttttagttttaattttggagtaggggttttttttttttgttgttaaaaagattttgtgtttgtttgtgagtgagtgtatttaagtggaaggaatgtttttatggttatggtggtttaggttttttgtttggattgggattttatagttttaatttaggagtgttaaattttggaagattttgggttagttttggaggtgtgtggttttgtaagttgttaggttaagtttgttttttttgtttgtttttttggtaggttgggtgtgttatggtagtgagttttttgtgtaaatggagagttggaattaaagttgatatttaatagatatgttaattgagtatttatttttgttttgagaataggaataaaaggtagttttttttaagagaggtggtgtaaaggtatgttataggagtttagaaaaggttggtggtgggaaatttgtagtttgggggttagttaatatttttttttattttaagtatttattgatttgttgttgttatttttggtgatgtagaaggatatttgaaagaatttttgatggggttttgatttgagaaaggaggtgatttgtttaggtttttattaaatttttaattattatattaattgtttttttttattttttatttgatttttttttttttgtttatttttaattttttaattatttagaaatttttttattttttagtggttttttttttgtagtagttttttatttgaattttttttttgtttttttgtggtagggtttgtatattgatttttttgatttttggtatatttgggttttttgaaattttttaatttttttagatttgaggatggtaggttttattttttttattgtgtgtatatatttagagatatgaaaatttatatagattgtttttaaatttagggtatttaatagatgttttttttttagtttgttttttgatttgaaatgtttgtttgattttaatttggatattatttttttttgtttttttttttttaaagtagtttggatatgtgtgtaagtgagtttagaatagttttatttatattttttattaaattgtaaataaaagaagaattaatgaagtagattggtatatagattgtattaagagtttgaatttttagtttttggattttttatttaattttggttgttatttatattgatagagttattttaagtagaggtttagagaaatttgtattgtgggataataggtaaagttatagtaaaaagtggaataattttaaagttattttattagaatgtaaattgtatttttgggttttgtttgtaattatttagttttaatatatatagagttagataggaaaaaataggttaatatagttattggtattagagaagataaattttatgggttttttagtgaaaagaagatttttaaagtttataatttttgattatttaattttatttataattgtgggaatgaataagatattaattgttttatgtattttatttatattaattaatttgtgtttttattaaaagtagttatatagaattttttttaatttttggtagtaagtttagaaaatgaagtttatagttattttgaattggatatattttttgagttgattatttttgtaagtgtaggaatataatattgtttttttatggtttttttgtatttttttagggtttgtaagtttttattaggtttgatattattgtttgggtttatatttattataagtaaatttgattattatgttgattttaaaatagtttatttggttagtataattttagtttttaaattataaaaattttttaatatatgaagtttttagtttttattttttttagttttttgtttatttaaaatttttattttaattggtgtaagtaataataatttgtattattatttgtattttttttatttttttggagattgggttggattttagagagaatattagtattattattattataaataataaaatttaaaagtaaagtttttatttgtatgataattggtatttggaatgtttttgatttatttaatgttattttataaaggtattttgtaaatttttttggaatttttagtaagagtttgtagtaattggaataattttttgggaagatattttttttgatgggtttttagtttttggaggaatagattgagagtaattagggagggaggggatattggaaattggtagttatgttagttgaaataagtttgggtttagtaaggtgattgatgttgtggttgattttttattttgagtttttttttaattggggtattgattttttttattttgggattttaaggtatttggtgtgtatgtagattttttttttgtggtttttattatgtggttttgtagtaggtttttggtttaatgatattttatagttatagtttttatatttattattatgattttaatgtttaggtttttagtgtatttatattaaatttgttttattagtaagttggagtatataggagagatgggggtaagtaaggatttagtagagtttaaatttagatatgtttaaatggttttgattgtgtaaagtgtggtaatgttttttgttgttttagttttttattttaagttttatatgttttttggttaatgaagtgtgatataggttatatgttaggaataatagtatttgttgagaataaagtgaatttaggaaatttggtatatataaaatgtatt

SEQ ID NO: 156 - DNA, 28536 bp, Artificial Sequence
  chemically treated genomic DNA (Homo sapiens)
gatgtattttgtgtatattaggttttttgagtttattttgtttttaataaatattattatttttagtatgtggtttatattatattttattagttagaggatatgtgaagtttagagtggaaagttagggtagtaggaagtattgttatattttatatagttaaagttatttaaatatgtttgaatttgagttttgttgagtttttatttgtttttattttttttgtgtgttttagtttattaataaagtaggtttaatataaatatattaaaagtttaaatattgagattatgataatgaatatgagggttatgattataaaatattattgaattagagatttgttatgaaattatatggtgaagattataagggaggaatttgtatatatattgagtgttttgggattttaaagtgggaagagttagtgttttaattaaagagaaatttggggtagggaattaattataatattagttattttattgaatttaggtttgttttagttgatgtagttgttaatttttaatgttttttttttttttaattgtttttaatttatttttttagaaattgaaagtttattaaagaggatatttttttagagagttgttttagttattataagtttttgttagaaattttaagaaagtttataaggtatttttataaggtggtattgagtaagttagaagtattttaagtattaattattatgtaaataagggttttatttttagattttgttgtttgtggtggtggtgatgttggtgttttttttggaatttagtttaatttttaaaaaagtaaaaggagtataaatagtaatataaattattattatttatattaattaaaatagaagttttgaatgagtaaggagttagaggaggtaaaaattgggaattttgtatattaaaaggtttttataatttgaaaattaagattatgttggttaaataggttgttttaaaattagtatagtaattaaatttgtttgtaatgaatgtagatttaaatagtgatgttagatttgataaggatttgtaaattttaaaagagtgtaaaaagattatagaagaataatattatatttttgtatttatagaaatggttagtttaagagatgtatttagtttagggtggttgtaagttttattttttgaatttgttattagaagttaaaagaaattttgtataattgtttttgatggaaatataaattggttgatgtaaatgaaatatataaagtagttggtgttttatttatttttataattataaatgaaattaaatgattaaaaattatagattttggggattttttttttattgaggagtttatggaatttgttttttttagtattaataattgtgttgatttatttttttttgtttaattttgtatatattaaaattaggtggttatgaataaaatttagaaatataatttatattttaataaaatgattttaaaattattttattttttattgtggttttatttgttgttttataatgtaggtttttttgggtttttgtttagaatgattttgttaatgtagatgatagttagagttgaatggggaatttagaaattggggatttgggtttttgatgtaatttatatgttaatttattttattagttttttttttatttatagtttggtaaagaatatgggtggagttgttttgggtttatttgtatatatgtttaaattgttttgaaaaaggaagggtaagaaagagtggtatttaagttggaattaggtaggtattttagattaagagatgaattggaaagggaatatttgttagatattttgggtttgaaggtagtttgtgtaagtttttatatttttgagtgtgtgtatatagtggagagggtggagtttgttatttttaaatttgaaaagattgagagattttagagggtttagatgtgttaaaggttagagggattaatatataggttttattatggaaaggtggggaaaaggtttgaatagaaaattgttgtagaagggaagttattgagaggtaagggagtttttgaataattaaaaagttaagaataagtaaaaggaaggaggttgggtgggggataaaaaaaagtagttgatgtggtaattaagaatttggtgggagtttgggtaggttatttttttttttagattagagttttattagaaatttttttaagtgtttttttgtgttgttaaagatgataatagtaaattaataagtgtttgaaatgaaaggggatgttgattagtttttaggttatagattttttgttgttagttttttttgaatttttatagtgtgtttttgtattgttttttttaagaagagttattttttatttttatttttaggatgaaggtaagtgtttagttagtatatttattaaatgttagttttggttttagttttttgtttgtgtggaaagtttattgttatagtgtgtttagtttgttggaggggtagatagaaaaagtaagtttggtttggtgatttgtggggttatgtatttttagggttggtttggagttttttagagtttaatgtttttgggttagaattgtaaggttttggtttgagtaaagggtttgagttattgtagttgtgggagtgttttttttatttgaatgtatttatttataaataagtataaaatttttttaatagtagaggagaaagatttttgttttaaaattaaagttgggaattattggaaattttgttttgagtgtgagatattggtttgttatttttttaatttttatattttttttgtaatatgttttgatttaataatttttttagtgtttagtattgtttggatgttttaattgggtaatttattagtgagttaatataggtatttatatatttttttagtttaagtggttaagtattaattttgaaatgattataaaatattggaattggtaatgtatagtaattttaatttatatgtaaattaattggtttattttaaatgttttttttaaaaaaataattattgtattgtagtattggaggtatggattaaatttttagaatagataatttggaaataagatttggattaggaagataatttagaatagttaataaattaataatgtttgaggtagttaaatattgttagttattggtatttatatatttgtttgttgttagataaggagttggggaaattgtttgttagggttgagattataatttagagtgaagaaagtaaatggtagtatatagtttgttatagtgggttttgaaataatattgtattttttttaaattttgatttttgggtgatagggagttggtggaggttattttatatttgtttatggttttgttttaatttgattatgaaattgttgttttttttgagttttttaatttgattattattttaatggttttgttatttgttttaatatattggggggaggagtgtaattgagatttttattaaaaattatttgaatttatttagttagtattgttttatttaagtttagttttatgggttgtatttaattttttgtgttttttatatattaaaattagattattaaaatgttggtaggaaagggtgaaggaaatggtttaatgttttagtttattggaagattattatttttagatatagtttaaaattttgaggaaataaaaaggatatatgttttggggggaaaatgttttaatattttagaatgggggtattattttttttattttagagaatttgtattggagttgtttatgtaaaaatgtaatatttttgaaatttatagatatgtaaggttagtgtttttttttttttaggtttttagtttaggtgatttagttttaaaggagttagtatttttgatgttataattttgtttatatttgtagggtagagaattgtttgttttgtttggatgttttttttatttttttttaatttgaagtaattggaatttaaatatagttgttaaggtttgttttttttttattgttttgataagggaaaaatttgaaatttatgttttaaattagtttggtggtttgtagttttttagtattttgtttttatgattgtatgtttaatgtattttttggtgattttgggtattaattagttgtttaataggagtatgattaaaaatgtaaaagaaggattaggagtgtgaaatgtatgtttagttttttttatatatttgaggagggaatgagaattattttgtattttttatttttttaggagttatttgtattttttattagttgtttattttagttgtattggtgttgggtaaggtgaggatttaaaagtttagtgtagtgtttgtggtggttgggattggggttaattagtttttggtgggtgagattttagatagaaggggggtgagaggaatgtgagttttttgagttttttttttttagttttggtttgtaaatttttgaaatttgaaaggggagggagttgtatgtgtgtatttttgtgtttttttagtgtaatttttttttttttttttgtgtttttttgtggatttttgaatttttttgtttttggtttttttatttttttttaatttttttatgagattgtttatttttgttattagttgaaggtaaggttgttttgttatgagtgttttttaatttttataaaatgaaaagaaaaaaagggaggattattagtttattatttagaggaatggggaggttgtaaaaattgttgatgggtagaggtgaagatgttttttttggattgtattttttggtgttttgtaattagagtttagttgtgggatttgttgaagaaatttgatttttttgttttggtgagattttaaaaattagaaatagaaatttttagagttagagaggaaatataattaaatagtatgtgggtatttttttttttatttttttttttttaaataatattgttttgagtttttattgggtaaagagagaaagtttgagtttttatggatgttatgtggaggttagaaatggtttaaaatgtagatttttaattagttttttttgtggttgaagaggttaattttttttataaaatgagtttatttgttgattgttagttattttaaagtgaagggatttagtatttaaaataaattgagtaagtttgtttgtttgtttttattgttaatttaaatgaatttaaaatatggagtaatttaagaaaatatataatatgttttagatagtttttaaaagtagggaaagtttagtatttatatagtgattagggttagttttaagtgttaagtttttttaaatgtatttattttatgtatatttttttgagttattatatatttttaaaattgtgagtattggtatattgatttaggaagagtaatataatttttagagggaattttatttttaattagggattaaagagatgtttttttaatagtgggtttgagttttgtttttaagtaggaattaatattggtgggaaaatttgaatttaggagtaatggttgtgttttggtattttttaaaaatatatattaataggatgtttttgagattgaaaaaatattgttttatatgtttggtagaagtttttatatttggttttttaggtgaattatatttatagtttttttatttagaggtaggatagagttaaaatattttgtttattattaaaatatatatttttgtttaagttaagaaattagaaaattagggtttagaagtaaggtatattttttgagtgagaatatgttttgtaattttatatattttttgttttgtaggagtaaatgtggatttgagggaaatttttttttttatttttatttttattttgtgtaatttaatattatttttgttaggaattttaattttgttattttaaaaaatgagatatttgtgatttagggtgaatttgttgaatgtaggtatagtagaggaaattttagattttatgagtgtttgagttttgtttagtgtaaattttttgtgaatattgggttagtgtgtggttgtgtttatttgtgtgttgatatttttagtatgtttggtttatttgttttgattttgggtgtggtgttttagttaagttgggtttagtgttttggttttttttagttgataagtttagtttgtttgtttttggttgtggtttttttatttttttttattagtttattttatttttttagatttttttttatttatttttttttatttttattgtgtttatttttatttttgttttttattggttttttatttttttttttttgtagtttttttttgttgtgatttttttttttaattttgtaggtttgaaagaaggttatatatgtatgtttatatttatattttatatgttttgttttaaataattttatgaatattgttttttgttttgttttttgggttattttttttgttgtttttttttagtttgttttgatttgttttttaaaagtatgtttttgtttttttgttgttttggtgttttttttttgatttattagggttgttgggttggtgtagattgttttttttttttttttattttatttttttttttggtttttttttttatagtgggagtttgtgtttttgttttttggttggtttttaagtgttttgttaggttttttttttttttgtttttttggttttggtttttgattttttggtttgttggtatttgttttttttttttgttttgttttttgttgtttttgtttgttttttttggtgtttgtttgggtgttgtgtttgtttttggattgttagttgtgtagttgggtttggttggttgtttgtgtgttattgtgtagtggagtttggtggaatttttgttgatgttatgttattttttatatggagtaggagtagagggaagagagagggatgagagggagggagaggagagagagtgtgagattgagtgagaaagttggagaggagtagaaagaaattgttagtggtggttagattttggaggttttagtgtatttgtggatttttttggaatttggtatttttaggagttttgtagtttttttaggtttggtttttgggtgtttgttgtgtagttggaggtttggtttgttggaaattgttttgggaagtagtgggatgtggagatagtagtttttttttggtagttggtaagtggaggttatttattttgtagggatgtgagataatgtgagtttggaaatttgttttattttggagaatttttattgtaggtgatttgtggtttttggggttaagttttgtttaaggtaatgtagttggtaaatagattttgtaaagttttgttttttttgttttttgttatagatattaataatttatagggtgttgaagttgagagggaagttagattgtggttggtatttaaaatgaggtatttttttttaaattttggtgttaatattgtaggaataaatttttgggttaaggattagtatttttaagataaagggttgggtataaagttttagttattggaagattagttttttttttattgttatttattgggaaaaaaaagaaaagaaaaagattttattttaattggtagttagtgattttttaggtttaagtgaattatttgggagttaggtttggatgttaagtttttattatttttttggattgtaatttttttaaattgattattagttaattttaatttggtattttaggagatatattttaaatggatgtagagaattattttttagttggagattaagaaaaaaatttttgattttaaatttttgaaatatgttttttttttttagtttaattattttatttttttaagtaatttagaaattaaattattataaggtggtgtgatttttttttatttttttgtgtgagtattgttttattaaattaaatggaaaaaatttttattattataaatgtaaatattagaatttatatattttaaaatatttttatgaaaaattaatttgatttaaagaaatttttttgtatttgttttagtttattaattaaaattaaagatgtttttattatataaaatattattttggtagaaatttatttaaaatttaaatattaataatattaagaaaataaagtatataagtaaaataaattgaagatttttgttgatgtaatatgagtatataatattttaataattaaattttttttaaaaaattaaatagttattttatttgtggaatgttttattttaatttagtaaaattatatttaaattatttaggtgttttgttttttaagttaagtgtgtttgtttttaaatgtttttaaagtatttatattaattggttgtaaagaatgtatatatatggtaaaatatagaattgaattgagtagtattttaatttttttaaataattatttattataaattaatttattggttaattttataatttagtttatttaaaatatatgtttttgtgttgtttatttttaaattttttattaaagattttgttatggggtaataaagtgtatgaaaaggggggaaatgtgaaaggatttgggattatttgaattgtattttttttgtatttttagttttgtggtagttattagaaattattttttagtaaattgttttattttttagggtttgtttgtttgttttgttatggttttttgttttttgttagttgtgtagtgttttttgtgtgtttataatataaaatttaagttggttaaaataagagtttttggtatatatattttaattagaatatgaattttgggggtgagaattattttttattaggaaaagttttttattttaatttgtgagattagttattgaagttagttttgaagtttggtagttaaattttttatagaagatttgttttgatagggtaagtttaaggattagtaggtgggaattggaggtttttttttaaaaaattattttttttagttatttagatttagtttttttagtaggtttggttattaaatgaagtataaaaatgtaagttttaaggtttattttgattgtaaaataaatttttaagttataaggatatgtaggagtgagttaaggaatatgttttgattttttttttagtttttagagtggagttttatgagtttttgaagatttgttttgtattgttttgtttggtttttagtattgaagtatggggaagtggggggaagaatgtgtaataattgattgattttatattaagtaatgtaattttttttttttgtatattttattttttaaaaaaaataaataaataaaaattatttgtagttattatttgtagtgttttggttattagttaataatgtagttagtttagatatataaaaaaaaaagattattgaaatgatgatgatatgtaaattttttttgaaattattataagtaaatatttgaagtttggattaataaaattttatttgtgttattttatattgagttagtagaaagttgtgataatgaattttgtaatattttatgaatagatattttaattagggattaattttgtgattttattgtagaattattaaatttggagttgttaaattgttatttttgggtttatgggtttataaggattgaattggtagagtttttgtttgtgtttttgttagtgggtgggggaattgtttggttgtttttattttggatttttatgttatagtgttgggtagttttttttgtaggtagtgattttggttagaggttttttagggtttagttttttttaggagaggttgagatgtagggaaatggtatttaggttagaggtaggtttgtagttttttgttttgtttttgtgtttttgttaatttgataatgtttgtttttattttgatttttgtatttgtgtgaagtgggttttttggttgttggtgtattttggttagtgtggagagaggtaggtgttgagattgaaggggtttagggagttttggattttttttttttgtttttaaagtaattgtggtttttttatttatttggtggagttttttgagatttattttttttggtttgtttgtggtagagaagggggagtgtgttaaatgtttggtttgttgtgttgtggttgaaaatgtgaaaaagatttggtttgtttgggagagaaagggggagaattgggtagtagttatattagagttatttttttgtttttggtgggtagtaaattttttaagaatgtttgttttgttttttttagttttgtttagtttatttagtgttttttttttgtgattttaaattatattttagggtaattatttgtagtaagtaaataaatggttgggttagtatttttaggagaaagtgtggttaaatatggaaaagtggtttttgatggatgagaggtttgaatttagtttgtttttgaaatattttaggttaagagtttgtttgttttagaattatagaaaattgagggaaattgttgtttaggataggggtatgttggtgttgatgttttataaatgtttattgagttttaattaatggataagtattgaagggtggtttttgtatatagttttttaaagagaaaagttttttttatttatttatttttgttgttattgtgtttagatgagtttttaattttggtattgagatttttgaaagtaggtttatagtttttttagtatattgtggttttatagttttttaatttttgggtatttttgtggtaattttggagggagatttttttttgataaataaatgttttgggtttgaggttaggttggagatgttgttgtatagttagaggttgttaggttggaaaaatatgtttgaagtttagtatatagtaggtgtttaatagttagtgtaatgtagttttatttgagttttgtttatttgatggttgttgttttttatagtttttttttttttttgttttgtagataatggggaatggagattaattgttgtaaattggtgttggtgtgtgtgtaattaggtaagaattttttttttttgtttgggttattggatgggaggttgtgttatgtgagggtggtaagagggtattggttttgtggtgaggttttagtgaggggtgtttttttgaggggttagtttgggtaggaaggaaattagaattaaattgttagtggtttttttttgtggtggggtggtggattaggaagtagtggtgtgttgtgtattgaagttttttagtttattttttttggttggaattgttggtaattggggaggtgtagaaagagtatgttattttgttttgggttgttagagggtttgggggatggggatgttgttagtttttttttttaattgggtttttgttttttgttttttttttttttttggtttgttttgtttttttttttttttttgtttttggttttttttggttgtggtttgggatgtttttttttgtatgtggggtgggtgtgtgtgtggtttaggtgtgtagttggtggttgttgaatgttttttttttaaagattttgaaattaaaaaggttgagtttatggatttttttgagagttgaaaagaggtagttagtagtaagttttttttgtggtagtattttggtgttaatggtaaggttgggagggaagtgtaggttgtgtgttgggtatttgtttttgggattttgggttttgggtgaagtgtaagaaggtgaggttgttagatttgatgtgtttgttgtttgaatttagatattttgtttttgggtgggatgggaagtagttgttttagggatgttaatttttttttttaaattatattgtatttttgagatttaatattttttttttttttttgtttgttttttgtggtttgattttttgtgtatgttttagtaaattttggtgtttaggttggtgtggaaaagtggtttaatagtgatttttgttgtttgttatattttgttgtgtgtagtattattagggtttatttagttatttaggtttttagttatgttttatttagatttgtgggtgtgtggtttattgtgggaggtaagtaagggaaatttgagttggtgaaggtttgttttggttggttgggggaggggtggggggttgataatatttttgaagagttggagggtagttattgtgtttagtagtttagggtagaatggaggtttgtttttgttgatgtgaatttgtttgaagtattggttgttaggttttgggttttggtgatgttgttgtttgattggttggttttattttggaggaattgagggatattgttagaggaggtttataggtttatgtaaaaagttaaaaagtttttaatttatgttataggttttttttgaattgaaatttgttttatggggtggaggggggggtgtaagggatggaggagggaagatgtttttttttttaaatatatggaaaaaaattttttaaatttattgtttttttatttttttggttttgtagtaaataagtgtttagttttaggaggttattgatttttgataatgtgagtagataaagtttttttttttttatagtttttggtttttaattttttttttttggattaaagtgtaagaatataaatgtaatatgggatggaggggggtgatttgggattttggttaaaaaaataaattgtattattaagaagaaaataaaggttttgtattggagtttttttgtgaatttgagagaaaatgattatttgttgaaatgaagtgtttaaagtgatttagtgttttatgtttggatattgtattatattgttagttgttttgttgggttagttaaatgtttatttgtttgggattaattttatggggttaaatgggggtaatgtagagataatgttgtgtgatttttgttatttagattgtgttaaattttttttttgtttgataattggtagtaaaaataaattattagattgtagtatgtttgggatatggttaaaaattaagagtagtgatgatttttggggagaatgttttgtgtgggtttagttttggttttggttagattagaggagttttttaattttgttttgtgtggggtgggtttgtagttgttaagttgaggttgatattttttattgtgttgggagttagagagatgtaaaatgttttttttttttagtttttattttaggttttttagatatggggaatgtattttgaggataggtggagaagtttatggtaggatggggtttttgtaggtgagtaggaaatggttaagagtagaggagttttgtttgtgttagttataagttgtgtaggtgtttttggttgtttgtttttgataattagtatataaagaattagaaataatgaatgattgtttttttaattattatttttaggtttgtattgttttagtgtatgtgaaaggttttttttttatatttaatatgtttttttttattttttgattgaaaagaaaaattgttgtttaaatatgtttaatgttattaattaagaaaaggtatgtaatgggaagaaatgttgaaaattttgatttaattggtttttaaggaattagtagatgataaaaaaaaattatatgagtgggtaaagttatagtattgttgaaggatagagtatttatttttttttgattttaagttaatttatggaatatttaaagttttggttatagtttgtttgtaaaataaaaggatttattttttgtgtttttttaaagtttttttttgtttttaaagagaaaaaaagtttataatgatatatgatttttttaaaaggttgtgatagtttattatgttattttttttgtttttgtttttaatgttgtttaaaaatattatgtttttgttaaagattaaatgttttgtataggtagagtttatttttaagtagtttaggttttgttttttttttttagtgagttttattttttttggtatttattgggtggatgtttagtttggatagaattttgaaatgggggtagtatgagagtgattggagatttttaaaagttagaggtttgagagagggtggatgtagttagtagaagatggtgtagaagttagttgagaatgattttttagagtaaagagatttttttttggttttttttgttttgggggttttgaaaggaatttataaaatggtttttatttttaggaggaggatggattgatttttttttgttattggtttaaaaagttttagggtggtggttttgggttttgtgttgaaattggattgtattgtagtttttttggatttgatgtttggttttgtgttttgataaggggtgggtattttttttggttttttttaggaatgtattaattgttaaatagttttggtttagtggatgggttgaaagtgtttgatttaagttgttggtgtgtatagattttttttttttgggaggtgggttttatggtttgttgtggtatttttagttgtgatatatatttttatatgtggtagtagtttggttttaattttttttgaaggatttgggttaattttggtggttttggtggttgtagatttttttttgttgttttgtttttgtgttttttatttaattagtgaatgtttgtggagtatatattatgtggatttttaatgtattttttgaaagtaaataatatagttttttttgttgttatgaagggattttaattttaatatggatattagtgagattagtttagattgtttttagtaaaatgtaaaatggtggtgtgtggggtggtgattaaggttttgagttttgttagaaagaaggggatgtgtagagaaaggtggagaattttagttgtggttagtgtggaagggataggtgtttgttgaagggggtatgaggtttgaggaaaaagtaatgaaataggggtaaggagagttttttatttttttttttttgtttgatttttgttattttatttttttttttttttttttattttttgtgttaattaaatttgtagtttatttgaaaggtgttttgttgtgttgtggttttttatttttaggggaaattgtattagttgtttgaaagtagttagtttttgtggatttttgtttgtaaaagtggtttttataggttgtgttttttgttgttgatttggtatataaagttttttaaggttggtttggttgttattttttattgtttgttgttaatatatgtagtagttgttagagtggtttgggggaaaaggaaatgtataatgaaagtttatttgtgagtaggaatatattaatggaataatttgatgtttttttaattttatgtaaaaagttttgttgtttttttaatattgattgaatgggtaattaatggttttttatttaggtgaatattttgtaatttaagataggtaaaagataataagtttaaggtagaagataaaaggtttaattgtagtggtgtttgtttgttttttattttttagggtttttgattaggaaagtttttttttagaggagaaaaaggtaggagtgggagaatatatatttattattttggggttagattttattgtagtatttgattatttagtttagttttttgttattttgtttttttatttttagtttttttttttgtatttttttttttttttaatttttttaggatgattttttattattattgttattatggttttaataatttttttttttaaattttatattttttattttagtaattaatgaggttgttttttgatttaggaggagattttttttttttagaatttaatgtgtagagtttttgagaattaaagtagttggtaggggaggaagaaattaatagaaagggagagagtatatagaattgtgtgtgtatgttaaagagtgattaggaatgatagagttaatttttttgtgaggatttgatgggaagagtgtttaagattttattagtatgtttttaataggttgatattttaatttaaatttttagaagtaatatattatttgggttattataatgaggtgggtttttttttttttgttagttgatagtttttaaaatattattttgttagggaaataaaagttttattttagattataggtgggtatttttggatttaggtgatttatggttattatgataattaatgttgaatgttagttattagtatgtttgggagagagaaaatagaaagaagggagagtaaaagaaatagaaaagggagatggatataagttggagagggaagaaaagagaaaaagaggaagatagatgagtgtttaatttaattgttgtttaaaaaagtggtgggggggtgggattttatttagttttttgttattttttttttttttgatttggatatttatgtttaattttatattttatttttttttttttttttttaaatatatgtgttatattattttttttattttatttagtttggtaagtagttgttttttggagatttagtgatatttaggaaaattgtggtagtaatatgtaaatgtgaggaagtattaatagtatgtttgttgagtgattttagtaaatgtttttttttttaatttttttttttttttttttttaggttattgtgaggtggtaatttttattgttatttgaatattgtttttttaggtagttattttaaattttaaatggttgagtagttagagttgtgggttggaaaaatgggtattatttgtagggatttagagagggtggttgttgtttaatatatttatagatttttaatttagaaaataattttttttttttgataagttagagttttttaaattttatttaggaaatggggaaaaggatagttatagtgaagtttttaatttttgggttatttggttttatagttatgaggggtggtgggtagtggattgtttttagtttggtttgtatgtagagaaaagttagatattggagggggtggggtattttttgggtaggatgtaaggtttttatttgatttttgtgttttattaggagtttatatatttatgtttattatgtggttttaagttgagtttaggtgggttttgtttttgagttagtttgggtagggtaggatttttatttgtttaaggtttaatagtttagggagatgtttaattaagttattttttgggtgaattttgaagatagattttttttaaaagttagagattatttggttgagttttaggttagattgatatggagagtttggtggtatagtttaattgtttattgttatggttagagggattttgtataattaatattgaagagtgtgaaattaaataagattttaagattggtaattggtggtaaatattagtataaaatatggttgattttatgttatatattttttttttttagggtttttttttgaaagaataagtaagaaattttaattgagataatttttgatgttttttagatttaaaattttatgttggtattgggttttttttttttgttttatgtgagttatgtagtatttttagtttttttattaggattttattaatgttttttgtattggaaatttttgtgttagaggttgaatttatagtaatttttaaaattaattaagaagaatttagttagaggttatagtaatgttggaattataaaatgtataagatttatttttttttggttttttttttatttatgttgtttatgtttgtgtatttataagttttatgtatattaaatttttaaaattaattattattatgttatagagtttttattggatagtgttttttagtttttattatatatttttttttttttatgtagatttattatgttggtgttttgttatatagggggtttgagaagaatgttatttaattgttgttgttgtgagtgtgtaaagtgattaggagattaggagaatgttgaaatttttgttggaaaaatgtaaagaaaatttttattttgagttagttgtttatagagttagtgtgtgtgtgtgtgtgtgtgtttgtaatataaaatggatgtgaatatatatatataaatagatatggttttgtttttattttaatttgaattatttagataattgtttttatttattatttgattttaatgggtttatataaattaggatattttatttttttaggtatttaggttgttgttgatttttagtgtttttaatattttgtatatgttggtattatgaggagtagttatgtgtttttgggttttttaattattttggaggttgattgaggttttttatatatgtatatttgttgtgatgaaagttttattggtagagtggagttattagagtttttattaaaattttgtgggtttatgagagatgggtttagaaatttatatggttttgtggggttttttggttttttaaaataaggtattaatatttaagtttttaaaaatatttgtagttttggggtttgaattttgaaaaataaggagtgaggggttgtgtatattaattatagtggagattttttttattttttaatgtgatggagtttttttatgaaatgaagttttaaggggtatggtattgtggggattatagttattttgaggtttaaaagaagaaattggaatatgattagtaaatatatttagtagaaaagagttggatttttattgatttagttataggttattggttggtagtgtaatgggaggaaatatttattttatatatatattttatgattttgggggaattagaggaaatttaataagaaaatggttagaaatatttaaaatttttatttaaaagatttaagtaaattagagttttattagattaaaaattattataaatgtaagagtattgtttttagtgaaatgttgtggggtttgagaaggagattttttgttaaatttttgggataaaatgtgttatttaagtattagataatgagtagaatgtaaattaatttaattttttttattaataggttgttagtgtaatgtgtataatttagtgataagattgtaggatttaatatagttggatgtatgagttttagttaatgtagatttgttatatgaggatgtgttttattttgagtaggtgtttgtatgtgtggaatggggtaaagtggaataaaaggttaaaagtagaaatgttgatttaaagtttattatgaagaaattttttttttgtagttaaattatttttaaagtgggatgatattggtgaagaaagattgaaaaataatttttatgtgtgtttttggattgtaagtttaaaatggggaggagttgtagatagggtttgggggtggttagggtaaaggagagatatataagttgtaaatatatttgtagtttgttttatttattttgttttatattgaataagttttttaattttgtgaataaggataaggagggagtgttttaaagatattttatgttggtattgtaaattattgattgtaatgttaaataaatatatatttagagatgataatattaattttatagtaaaataattgtttatgtagaaatttagaggagattagtttgttttttttagttgatttatgttgggggataaaaggatttttaaaaattattttgaatatgtttggatttttttttttaatttttttggaaattaaatttgtttggaaatagtgttataaagagttgatgtttttaaaggtgattttttttgttttatataaataaggttttgtttttgttagttgagtgtagttttaggttttttgtttttagtttatatatattttttttgtttgtttggattttaatggtttaagatagttttgagtttattgggaaaagaaaatgattgttaaaaattatttttgaaattggttatttggtaatatttttaattgtatggaaatttattaaggtatattttatatataattagtttaaggttgttgattttataggttttatggatttaaatttgattgataataaagtaaataagagagttgaatttaaagtgtggtttttttgggttaggatgagtttaatatagtgtataaggaatttgaaagatttaggatatgtgttttaattaatgttaagtagaatggataagtttttagtattttgaaaatgttgggttagggttttttttttattgtgtgttttttgtttggggattaataagtattatagagaatgtgatttgaggtgattttttatttttgtataaatttagagtgaattattaaatagttgtttgtttaaagttaaggtaatttttttttgatgggtttatttgttttttgatttttaatttattagtttgtttttttagggttttgttttttttgtaattaaagtttttttagattagtgtagtatttatttgataggttgtttggaaaatttaagattggagaggtgatttgttgttgttttttaaattttttagttttaagtaatgtgttttttttttatatggggtgggggattggaaatggatgtagtgagatataaagagtgggtgttttgttgatttttgtatttttttttttttgattattttattttttttttttaagtttttgatttttagttttatttttttatttttgggtttgtattaaaagttggattgttttgggttgggtaggagttgaatttttgggagtttgtttgtgtagatttagtgtgtatggtgaggtagtagtttggttttgtattgttgataggtgtaggtaggatagtttttttattgtggtttggggtgttttgattggtgtggagttatgttagttgtatttggagaagggtttgggaggaggtggaggtggagagggttggggagggttgtggtggagtgatgttttggtattaggaagtttgtttttggttttaagatgttaggttaatagggaagtgtggagttgtagatttggtttgttgtttgtttgggtgtttggagttgagttgtggtaaggtttggtttttgtttgattgtttgaggggtgtgtgtgtgtgtgttgtggagggtgtgtttagagggttgtgttgtggttgtagtggttgttgttgttgtaggggatttaatattatttatttgtttttgttatttttgatatttttttgttagggttgttgtgtggggggggggtgggtagagtgtggttggtgttagttttttttattggaggggtttttgggggagggagggagagaagaagggggtttttgtttatttttgttttgttttggagtttggaagtttgttttttaaagatgttttgagtggtgtttttttgtttatattttatgtttttgtttgtttgttgattttttgtttttggatttttttgtttgagttttttggaggagatgggggtagtttggtttgagaatttggtgggggttgtgttttttggttttttttgtagtggggaaattttgtgtttagagtgtgatttggagtgggtagtggtggttatgggggtttggtggggtagtagttaaggattagtagagtgttgtgtttttttgtttatgaattgtatgaaaggtttgttttatttggagtattgagtagtggggattaagttgttggttgtttttttatttttttgttattatttttagttgttagttatggttttggttttggtttttggttagttttggttgttggatttttttaagtataggttggaggtgtatattatttttgatatttttagtttggaggttgtaggtaaggtgttgtgttgttttgtagatatttttgtttagttgttttgtgttatttgtttttttttgttttaaggaagttagtttttttggggggaggtgtggtgggagtggttgtttgtttggttttttgtagaatttttgggagttggaattttgattattttgtatttttttagtttttttttgattggtttggtttttggggtgttaagggtgtgagtaattttgttgttttttttatttgtattttggttttttttttgttttttgggttataaaaattttagtattttgatttgaggatttttagaggttgttgatttttgtttttgttttttttttggtttttagtttttgaggagttttatttgttaggaaattgtttgaaattatttagaaatgttttttgtgaagaggtattttttttttttttttgggaaagggttggtgaattttggtgtttaattgaatttttatatttttttttagtttttttaaattgtatggaaatttgagttttttgtgagggggaggggggtttgtaaattatgtgtgtgtgtgtgttttaggagatttggtgtgtttgtgtagaggtgtataaatatatttgaaagtataggttataaaagtgaatgtgttgttgtagtgagataaatatgtaaataaaatgtgtggtgttgggggaggggaggaaatggggtgtggatatttatatttgtgtttgtatattttataggtgtagtgttttttgtggtttggagttgttgtgtgtatttttttttggtgttaggtagtttagtttttttatggtttttgttgttggtttagttggtgtttgtgttgtaggtgggtatgttgatgggaaagtgtgtgtgttttgtttttagagaaagataaaagttagtaggggaagaatgaggatgtgggtgttgaggatttgtttaagaagaagtggtaaaggtggtagtggatttattttattagttagtagttttaggagttggaggttattttttagaggaattgttatttggatatgtttatatgtgaagaaattgttgtgtggattaattttatggaagtttgagtttgggtaggagttagtatggagtttgggagggatggggggaggatgttgtggaggtataggttaagtagattaggagagaatgtggaaggtagtgttgtttgggagggtgttggtggggtgtagttttgtaaaggtagaaggttttgtggtggtttggttgtgagattatagttttttttttgaggttgataggattgttgttttggtttaggtttttagagtggtattggtttattgttttgttattttgtgattttatgagttgggttgtatgggtaattttttgtataggatattgtgtttttggtttgtagttgttagagtagagttaataaaatttttattaggttaagagttgtgaataggttttaatttgtgagtttttaataaggaaaatttgttagagatatggaagagttggttttttttgggaaatttttgttttggttttggtttagtttttttttttttgggtttgtgttttttatattttttttatggttgttttggttatttaggttttttttatatattttattttttagttttgtgatttttgggagtaaagttttaatatataattattagtttttttagaaggagaaagaaaaaaagaagaaagatttttttgtttggtttatttatttttttttaggagttgaattttggaaattgaaatttatatttttttttttaaattataattatagttttgtaaaaagggtttattttaattttgtagtaaatttgtattttatggattggtaaaaatgagtttaaataaataatttaatagtaatgttttggtttatgttggttggtggaagattttaaatttgttaggattttggaagtagaaaatagaattaagtaaattaagtggtatttagaggttttgttgttaaaaaaaaaaaattaagtgttttgggtagaaaaaataaagtttttggttagagtagagtaaataaaaagaagaaaataatgataaaaagaataaagattaaaatgtttttttaaattagagggaatgaagatattttttgggtggtatttgtgtaaggtatgaggttatgttggtggataaaaggttgggaagaagttgaaaatggttttagtttaattgtttagagttagagttgggttttgggtggtgtggttttgagtaaggttagttttttattagtttttttgtatattaagggaatgggttttttatgtattttttttgtttgagtaaagtttagatggtttagggtagaaatggtaagtaattaaagatagagtttatgggttttttgggattttttgaaaatgtttttttattttgtttgttattttgtagttttattttagtgttttgtagttgtggtgttgggttttttttgtagttgtttttttttttagggtggttgtttgttgagttaagtgggagtgaggtgtgttttttatagtagttgggtgtaaagaggaagggggataaaaaggaaattaagaatgaaaggaaaaagagaaaaagtggattatatggttgggtttggtggagatgtgtaatgtgaaatattattggtgttagtttggatattttaggttaggtttttttttaatatataaaagttgttgtttggggtgatagggaggtttgatgtggattgggattggggttgtggttgggttattggatatgggtggaagttggttggtttgggtggttgtttgtaaagttaaatgatttggttgggtttggtgtgtggataggtttgtggtgggtttagggtaaagaagaggtagagtgaaagaagggggaatttttaaaattattttttttgggtttttggagtttaatatgttaagtttttggagttaatgagttgatgaagaggtggttttttgttttttatttggttgttttgttaggtgagaaagagtgttggtggtttagtttttgttaagggagtatgtattagggggtgggggatgatagtggaggttagggaaggaagggaggaattgtgtgggagaaagagtgattttttagtgtttttttagttttttttttttatttgtgggtttgtggttttggaatggaagtaagtttgtaaggtgttttgggaagggttggaaaagtttgttgttttgtgtttgttttatattaagtgtttttggatttggagaaatgtttggttgagtgattaaattgtttgtaggtttttatgtgtttggttgaggtttgtggtgtagttttgagttttagtttgtaggttagagtagattaggttttttgtgtttggtggagatttgggttagtaattgaaagttggttttggtattttggtgtgtagggtggtgtagtgaagtgaggttagggtgtgtgagtgtgttagtgtgtgtgttgggggaaggtgggggttggtttttgatggaagttttagtaatttgtattgtggtatttgtttgtttttttgttttaattgtttttaggtttggtttaagaattgttgggttaaatggagaaagagggagtgtaattagtaggttgagttatgtaagaatggttttgggttgtagtttaatgggtttatgtagttttatgatgatatgtatttaggttatttttataataattgggttgttaagggttttatatttgtttttttatttattaagagtttttttttttttaattttatgaatgttaattttttgttattatagagtatgttttttttatttaattttattttgtttatgagtatgttgtttagtatggtgtttttagtagtgataggtgttttgggttttagttttaatagtttgaataatttgaataatttgagtagtttgttgttgaattttgtggtgttgatgtttgtttgtttttatgtgttgttgatttttttgtatgtttatagggatatgtgtaatttgagtttggttagtttgagattgaaagtaaagtagtattttagttttggttatgttagtgtgtagaatttggtttttaatttgagtgtttgttagtatgtagtggattggtttgtgtgagttgtatttatagtgttgggattttaggattttgttggatggggtaattttgtttttgaaagattgggaattatgttagaaggttgtgggtattaaagaaagggagagaaagagaagttatatagagaaaaggaaattattgaattaaagagagagtttttttgattttaaagggatgtttttagtgtttgatattttttattataagtatttttaatagttgtaaggatatatatataaataaatgtttgattggatatgatattttaatattattataagtttgttattttttaagtttagtattgttaatatttaaatgattgaaaggatgtatatatattgaaatgttaaattaattttataaaagtagttgttagtaatattataatagtgtttttaaaggttaggttttaaaataaagtatgttatatagaagtgattaggattttttgtttgtgagtaagggagtgtatatattaaatgttatattgtatgtttttaatatattattattattataaaaaatgtgtgaatattagttttagaatagtttttttggtggatgtaatgatgtttttgaaattgttatgtataatttattttgtgtataatattttgtataatattattgttttattttttagtaaatatgaaataaatgtgttttattttatgggagtaaaatatattgtatataaattggtttggattttttttttttttttttgttattaatttggttaggatattttagttattgttttttaaataaattagttttttttgtttgtttagttaaatatataaggtagtagtttttatttaaatttggtagaaataaatgatagttatttattagaaattaaaaagaaaaaaaaaggtatttttgggggggaaaagggttataaaatttaattttgtttttttaatttttttttggtttaaatttagaggattttattatggttagtaaataatatgaaaaagaaaaaagaagaaagaaatttagtaagtttattagtttaaaatgatttttaagtttatttttttatggggaaatttatatttttagtaaattgttttggagaaatatttgtgtatgtatatatgtatagtttatatgtattttttttaggaggaatatatttataataaatttatagggaaatatttttagtttaaaatatttaggtttttatgtttatttttaggtttaagtagagagattttttatgttatattgtattattatttttaaattttttggagatattaaaagaaataaagatgatttttaataattatagttttttagttttttaaagaatttaggggttgagaggttagagtggagttttttgagttttgttgagtaatatgtagttgaggtaaaggttatgtttttggtgttttgttttaaataatattgatttattaattttaaatttgtttgtttttgaaattatataggattatagtttgtaaattgtaggataatgaagtaaattaagatgaattatagttttggttttttttgttattttttgatatttaaatagggaatgagtttggtgtgagtgtttaaatgaattttaagtatttgatttttttttatttgtgatttttagttttaaaaaaatgtgaaatttgattttataataaatagaaataaatattatttagttttagagaatttatttttatggtgttaggagggttgttgtggaggtggggggagggatgtgttgagattttttgttatgtttgttaattttttgtataattaaagtgggtgagaataaatattatgttggggaatttagagtaaaaagtaattgttgattttttggagttgataatattattgtttttttgttttagttgtttttatttgaatgaaattttatttagaagtttttggagtttgaatattgagtttttgttttgtaagaaattgttgttgttatttaaagagattgtagataatgtttttgatttaagattagtgtttaatgtatattttttttttttttaaagttttgtttttgatttgtggagggattatgtagtagtggggggtagataaaagttttttggatgagggttattttttattatgttgtttatttgagagtagtggagaggaaaatggtttttatgggtggattttggtttttggagttgtagggtttagtggttttggtttttttgttttttagtttggtagggggtggggagggttaaagggtggaggggaaggaaggagttagaagaggggatttggggatgggggttggaagtgttaatgagatttgtttggaggatttaggttttttgtaggttggtgagtgatttgggagttttgggtaaaagaggtgtattttggtttagtttggttgttgaattagaataatgtgaggatattaattaatttgtaggaaataaaaaatggaagttgaggtttaggaagagttgttatttttttgatttgagtggtgtaggttgggggtggagatttgggatttaagagaggttattttttttattttagttttttttttttggatttttaaaaggaataattttatttttttttttgttttttttataatttttatttttgttagtttgtaggttgtttgtttttttttgtattttttttttttatttagtgagagaaatttagtttttagagt

SEQ ID NO: 157 - DNA, 8252 bp, Artificial Sequence
  chemically treated genomic DNA (Homo sapiens)
gttattgtggttgggttataggtttattgttttgtggtagatggaagatatgggttttggtaatatattgaaatgttataggaaattaaattagaagtgatttaatttataagtatatttaggtttatttaatatgatgttttaaggtgggtggggggtttaaattagtagtttagggttattaaggttttaggttttgggttttattttattattatataatggttgtttgtaatattatattatatttattttttataatatttaaaggtaggttgtaagggttggtttaggaagttagagggtgttttttatttattaagggagaagtttgttttatttttaaggagatgttttttatgttttatgggttatatagaattgtatggttatttttggttaaaagaggggttgggaaagtgaattttttttttttttttttttgtagagtgtaagttaggtaagaaagaatggatggtggatagttaggaaatagttagttatgagatgttgtgtggaaagtttatttttttgatattggagaattgtgggaagaatggataggttatatattagttgggttttgagaatttttagtttttgttttatagtgagttagtaggaatttaaagggtatgggtagattttaggggtttttttattttatttaggggtagagagggtaagatggagtagagtgaggtaagagattgagtaatgtgtttttaaagattgtgattgatagaagttgtgtaaattattatgataaattgaattttaagaggaattggattaaataaagttagtttatttttatttgtaattagtagatagagagtgtaagattagatatattatagatggaaaagaaaagttaaaatttttttgtatatttgagaggtaagaggaggtgtttgtggtttttttgatatatatgtgatatatgtattattatggtttatgtgtgtgttgttgtgtgtagggggtagggggttttttgtttttgatggttttttttggtgggtgttttttggttttttaggtttttttatttgttgaatgtggtagttaagggtttgggaatgatttgttagattggttaatgtggaaagagttggttttgtttagttttgtatttttttttttttttttggaattgtttggttgtagagagtaggagttttttagagtttttgggggattttatttttagtataattgtgtaatgtgtgtttagtataagagtattagatggagggataggtgggaggaggaggaatttagggtgtatttagtttggggtttgttgagttgaggtttttagagtaaggatgattaggttggggggatatttttttttaatttttgttaagttatagaggggttagtgggaataaagtgatattttggtttttgtattttttttttgttgttttattttttagtttgtttagatttgaggttggggaggggtttttttggaggggttagtttatgttattttttgtaatttttattatatatgtttttagatattttgttataggttttattttttatgttaatttttatttgggaaagtaaataaatggaaagttaatttgtgttatttggttgttggggtatttgtagtgagtagttaagaaatgttaggggagttggtgtttatttttatgtttggataagagtgtgttttggatttgtgttttgttgtatattttattgttttgttgtatattttattgttttattgtatattttattgttttattgtatattttattgttttattgtatattttattgttttattgtatattttattgttttattgtatattttattatttttgttttttgtatttagttgtttatttgtattttagtttaggaagtttagaagatgtagaatttttgtgagagtttagggtgaaatgttgtgttttatttttaaagaaaggaaaattatttatattttttaaaagaatgaatagtatagattaatattgattttttttaatttttaggttaattttgagtagttaaagttagagtagttaatttgtgttgtgagttgaggtatagttgtagaagtgtgtttgaggtgtttggtggaggtggtagttgagttttgggattaattattgtgttggggatggtattgtgttaggatgtaggtagatttttgtagaagtgtttaaaatttatatttttttataggggtgagggggagggagaaagagatgttttagtgaggataaatatttttttttatatttaaataattatagagtttttattttaaagtatttataggtatattttttagaaaatatgaattgttagttgggtatggtggtttatgtttgtaattttagttttttgggaggttgaggtgggtagattatttgaggttaagagtttaagattggtttggttaatatggtgaaattttgtttatattaaaaatataaaaaaaatttagttgggtgtagtggtatatatttgtaattttagttattaggaagttgaggttgaatttaggaggtagagattgtagtgagttaagattgtattattgtattttagtttaggggtaatggagtgagattttattttaaaaaaaaaaaaaaaaaaagaatatatgaaatgtttttagattttgttatgttttttttttttattttaggtaagttagaaagtgttattaatagtggttttttttaggtttttggttagagatgtgaagagaagttggggggaaattaggtttttttttaagttttttagttttgtttttttatttttggatttgaatgtagtttgatttaggttattttattgtattattattggtggttgtgattttgtgtaaaggtatagttggtgatgttgattagagtttttgtagttttaaatgatttttttaattaattttaaatttttagaatttattgtataaaaaggttatattttttggagggatgttgatggtattaggatagaagtattaggggattttatgaatggtgttgttgaaatagtagtttttatttgtatattgggagggtgtgatattaggaaaattataattttgttttttatggggggttattgtatatgtttttgaaagtgtataggtaagaagtaaagtaagttgtgggttgaattttttgatgttattatgtatatatttatttagtttttttttttaatgatattagtaattgtttagtgaggtggatataaaatttttaggatatgagagggagatgtggtttttatattttgatgtgtaaatattatgtttagggaaaatgtaaggtgttttaggtttgtggattttgtatttttttaggtaatttatttatttattttttaattttaataaatgattattaaattttatttaatatataaatatttattgagtattatttgtgtgtatgagaagtgggagttagtatggtaaaagttaggtattgtgttaggtgagagagatttagaaattaaaattagagaagttattaataagagtttaaatatttgggtttaggtttatgtttgtaattttagtattttgggaggttgaaggaggtgaattatttgaggttaggagtttaagattagtttgattaaaatggtgaagttttatttttattaaaaatataaaaaattaggtgggtattgtggtatatgtttgtaattttagttatttgggaggttgaggtaggagaattatttgaatttaggaggtagaggttgtagtgagttaagattgtattattgtattttagtttgagtgatagagtaagattttattttaaaaaaaaaaaaaaaagagtttaaggatttgatggaggagaaaggtaagaatatgtgtgagataatgtaaggttattgttttagggtgtttagggtaattatgggggtagggtattttttggagaggttaatgataagtaggttgaataaagtaggggggttttttgtaggaggaggtttattaggtgaagatggagttgtatgggtaaaggttattttagagatttaggtgtgtttaggaggtggaaatttattgtaggtaaggtgagaggattgggtggggtggtttaggaggagttgatagagggtataagttgtgaaatagtttgaagtagggtagtgaggaaagggatttagaggaggaagatatgtggatagatggggttggttgggggttgttgtaggattttatgtaagaggttttaatattagagttttaggttttgagttttgtggaattaaaggttttagaaagtaatttattaggatttggtggttgatagtttgtagtagggggtgaaagaggagtttagagtattttttggtttttgtttttgttttggggtataggaggggaggaatttagtttggttatattggtttaggtgagggtgttttaggggaggttgagaggggttgtttttttgtttgttttgttattagggattgttttgagatgtttttggagaaagtgtttttggtttgttgggaaggatttgtgtttagtttttgttgtttagtagtttttatgggaattttgtttttttggggtttggatttattgtgatgtgaaggtgattattgtttatttttgggatattgtgggggttaagagaggttttgtggtgagggaggattattattttgggggttgggggggttttttttttagggaggaagatttttagttttggtgttttgtttttggtagattttgttttgtttatttgttttgtttttgttgtatgatggaaataaatggaaatggtttttatatatgaatgtattaaattgtaattataattttttagattttagttgtaataggattatggatttgagtgatttgtaaagatgttttgagttttgagttagagggtgtgtggggtggggaggggagtttgttatggtttttgtgattttatagtatagggggtagagttgggggttggggtgggggtaagggtgtaggtagatgggtttgggggtggttagtatggggatttatttagtttgttttgtatattgaggttatttttttttttgggttttaaagtttttttgttttttgttatgggtttgggggtttttttattgtagtttaatgttggttgtttttttatgttgtttaagtttattttttaggtttggtattttatagtagagattaagaggtggttggagggtagtgggggtatggatagtattattgggtgttttttttttaggtttttttggaaatttttgttttggaaatgtagaaagtttttttttttgtttttattttgaaattgtatttaataatggtaaataagttatttagttttttatagttggtaaagtgtaagttgtagatgttgttatatagtattttttgatagttttagggtagattgttgatttattttgtaggtaaaggagttgagatgtaaatattttttaaggaagtaagaatggtttttttttttattttttagaaggatttagggtaattgatttatttgataatattagggaatatgggttgttagttatgtatttatgagagaggtggttttgatttttagagtatggattttaggggagtttaggaatttgtaggagagggttttttagttggttattattgggatgggtatttgggtttgtgggagagggttttttaggtggttattattgggattggtatttgggtttatttggatgggttttgggagggtttgtttttgggggagatgttggtatgaatagttaaaagtattattttgagattttatgttaatattttttttttgaaatatgatatttgggaggattgtatagtttttttaatataggaaaatagttttgattgaaggtagttttttttttgttgtattttttgaaggtttttgggggttttgttattttgagttattttttatttgtttttgttgattttgtaaattggatatatttttaagggtttagaatagtatttggtataaaataggtgtttaaaaatatgtatgtaaaatagtggtttttggtggaggttgttagagttggttgtggttttatagagtaggaagaagtatgttttatttgtttgggttttggttagggtgttgagggttagtatggatattaggattagggtgtagattattttgttttttatggtggttattgttttttttttgttttaaaggtgattttgagttagggatgagaggttgtttgagttttggattttatagggtaggttttgtttgtttaaagagtgttagataatatttgtttaaggaggtttggggattttttgagataataatttttattgatttttattaaaggtgttttttagatatggttaagttatatggaaggatttgttgatagatagagatgatatgtggtgaggttattttggttgagggatttgagatttagaaagttttttttttttatgggagttttttttaatttgattttaatttaggttttatttatatttgagaggtttttttgttagggtaaatattgtatttattgtagaagtgatttatagtgagagatggttggaaaaaggtttggttgtgataatagtggtttatggggtggttattgtgattttgtagggggaagggaaggagtttatgaagtttattttgtttaggtttaagttaatttttttatagtggaattgttttaataatgaaattgtaggtttggtgtagtggtttatgtttgtaattttaatattttgggaggttaaagtaggtggattatttaaagttaggagtttgagattagtttggttaatatggtgaaattttgtttttataaaaaaaaaaaatataaaaattagttaggtatggtggtgggtgtttgtaattttagttattttggaggttaagttaggagaattatttgaatttgggaggtggaggttgtagtgagttgagattattttattgtattttagtttgagtgatagattaagtttttttttgggaggggttgggggtaggagggagaaaaaaatagtatatatgagttgttattaaaaattgataaagtgaatgtggtttatttttttgtgtttatggggtttttttttttttttttttatatttttttagttggttttttggatttttgtattttagaggatagttttttgtttttttgtattatgttttattttttttttttgtttggagtttttttttttatagtttttattattttttggtggataaaataagtgattgatatattatgttggttatttatttattgtatttttttttgtagtagatgggagggtgtatgggagtagaagtttttattttttagtgttttgaggtggttttagattttagaatagtggttttgattggtatttgagaaatagttgttgaagagttgtatgaagaaatggataataggagaaatttttttttttttagtgagaaattaggttttgaggaaaatgtatgttagtttaataaaggtattatttttttttgggtgatttagttagtatatttttgtagtttttttgggaggggagtttgggttagaatgggggtggttatgtttttttttgttttattttaggatttagttttttttttagggttgttatttttgtattggggtttttatttttgggttagggtttttaggaggggtttgattgtaggatttagggaggggttgaggtttggtgttttttgtggttagtttaagtttattgaaaataggatgggggtattaggtttagggtggtgtttatagtgatggtggtttttgttgttttaattttttggattaaaatgggggtttttggaaatgggatgtaaattgtataattatttggagaaaaggtgggtagtgtttggtgaggtttaagttatatagattttatagtttagtaaatttttttgtttttaggtttggttttttaattttagaaatatgtttatatttgggtagaagaaaatataggtaaagatattttttttagtattgtttgtaatagttggaaatagggaaagaaggaaggaaggaaaggagggaaagaaaagtaaaataaatatttattaattagggaaagggaaaatgaatttaaaatataatgtagttgttttttagtatttttgggggattggttttaggattttttatttagggatgttaaaatttataaatgtttaagttt

SEQ ID NO: 158 - DNA, 8252 bp, Artificial Sequence
  chemically treated genomic DNA (Homo sapiens)
ggatttgagtatttgtggattttggtatttttgggtggggggttttgaaattagttttttaggggtattaagggatgattgtattgtattttaagtttattttttttttttttggttaatgaatatttattttgttttttttttttttttttttttttttttttttttttttgtttttagttgttataaataatgttaaaaagaatatttttgtttgtgtttttttttgtttaagtatgaatatgtttttgggattaagagattaggtttggaaatagaagaatttgttgagttgtaaaatttgtatggtttaaattttattgaatattgtttattttttttttaaatgattgtgtaatttatattttatttttaagagtttttattttgatttgagaaattagagtagtgaaaattattgttattatgagtattattttgggtttggtgtttttgttttgtttttaataaatttaagttgattatagaggatattaggttttggtttttttttgggttttgtggttaggttttttttggagattttggtttaggagtggagattttggtgtaggagtggtagttttggaggaggggttgggttttgggatggagtgaagaggaatatggttgtttttattttggtttaggttttttttttagaggggttgtagaaatgtattgattaggttatttaagaaaagatagtatttttgttaggttagtatgtattttttttagggtttaattttttattgaagaagaaaagattttttttgttgtttatttttttatgtagttttttaatagttgttttttgaatgttaattaaagttattgttttagggtttggggttattttaaggtattaggagatgaggatttttgtttttatgtgtttttttgtttgttgtagggaggagtgtaatgaataaataattaatataatgtgttagttatttgttttatttattaggaggtaataagagttatgaaagagaaagttttgagtaggggaggggagtgaggtatggtataggagagtaggaggttgttttttaaaatataggagtttaggggattaattgggaaggtgtgggagggggagggagggagttttatagatataggggagtgaattatgtttattttgttagtttttgatggtagtttgtatatattattttttttttttttttgtttttagttttttttagaaggagatttaatttgttgtttaggttggagtgtagtagggtgattttgatttattgtaatttttgttttttaggtttaagtgatttttttgatttaatttttagagtagttaggattataggtatttgttattatgtttggttaatttttgtattttttttttttgtagagatggggttttgttatgttggttaggttagttttaaatttttgattttaagtgatttgtttgttttggttttttaaagtgttgggattataggtgtgagttattgtgttaggtttataattttattattaaaataattttattgtaaaagaattagtttaggtttagatggaatgggttttatgagtttttttttttttttttgtaaggttatggtggttattttgtgagttattgttgttatggttaagtttttttttggttattttttattatgaattatttttgtagtgagtatagtatttattttggtgggagggttttttagatatgagtaggatttggattaaggttaggttggaggagatttttatgggaaagagggattttttgaattttagattttttagttaagatgattttattatatgttgtttttgtttattagtaaatttttttatgtagtttgattatgtttaggaaatatttttgataaaaattagtggagattattgttttagaggatttttgggtttttttaggtaaatgttatttaatgttttttaagtaaatagagtttgttttataaaatttggggtttgggtggttttttatttttgatttggggttgtttttggagtagagaggaggtaatggttattatggagaataaggtgatttgtgttttggttttggtgtttatgttggtttttggtattttggttgaggtttagataggtaaggtgtgtttttttttgttttgtggggttatagttagttttggtagtttttgttaggagttattgttttatatatatatttttgagtatttgttttgtgttaggtgttgttttaggtttttaaaagtatatttaatttataggattggtaaaagtaggtggagagtaatttagggtggtagggtttttggagatttttgagaagtgtgatgaggagggggttgtttttagttggggttgtttttttgtgttaggaagattatataatttttttaagtgttatgttttaaagaggaagtgttggtgtggggttttagaatagtgtttttgattgtttatgttaatattttttttaggggtagatttttttaaggtttatttagataggtttaaatgttggttttagtgatggttatttgggagatttttttttataggtttgaatgtttgttttagtggtggttaattgggagatttttttttataggtttttgggtttttttgggatttatgttttgggagttaaagttattttttttatgagtgtgtggttggtaatttatattttttggtgttgttaagtggattggttgttttgggtttttttagggagtggaggaggaggttatttttgtttttttgggaagtgtttgtattttaatttttttatttgtagaatggattaatggtttgttttagggttgttaggaaatgttgtgtggtagtatttgtgatttgtattttgttagttgtggggagttgaataatttatttgttgttattaggtatagttttaaggtgggggtaggagaaagggttttttatgtttttaaagtaagggtttttagagaggtttgaagagggagtgtttagtggtgttgtttgtgtttttattgttttttagttattttttgatttttgttgtggggtattgggtttgaggggtgggtttgggtagtgtagaagagtagttagtattgggttgtagtgggaagatttttaagtttatggtagggagtgggggagttttggaatttgagagaggaagtggttttggtgtatagaatgaattgggtgggtttttgtgttggttatttttaggtttatttgtttgtgtttttgtttttattttagtttttagttttgttttttgtgttgtgggattatagaggttgtggtaaatttttttttttattttatatattttttggtttaaggtttagagtgtttttgtgggttatttaggtttatgattttgttataattgaaatttagaaaattgtgattatagtttagtgtatttgtgtgtggaaattatttttatttatttttattatgtgataaagataaagtgggtgggtaagatagagtttgttggaggtagagtattggggttggaaatttttttttttgaggaggaaatttttttgatttttaggatgatgatttttttttattatggggttttttttgatttttatagtgttttgggggtgggtgatgattatttttatgttgtgatggatttagattttaggagggtaaggtttttatggaagttgttgggtagtgggagttgaatatggattttttttagtaagttaggaatattttttttaaagatattttgaggtagtttttgatagtaaagtagataagagaatagttttttttggttttttttggggtgtttttatttgagttagtgtggttagattgagtttttttttttttatgttttaaggtagggatagggattggagggtgttttgggttttttttttattttttgttgtaggttgttaattattagattttaataggttgttttttgagatttttgattttgtggagtttagagtttgaagttttggtgttagaattttttgtataagattttgtggtagtttttagttagttttatttgtttatgtgttttttttttttagatttttttttttattgttttgttttaagttgttttatagtttgtattttttgttggttttttttagattattttatttggtttttttattttatttgtaatgggtttttattttttgaatatatttgggtttttggaatggtttttgtttatgtggttttatttttatttggtgaatttttttttgtagggagtttttttgttttgtttaatttgtttgttattggtttttttggggagtgttttatttttgtggttattttgggtattttgggatgatggttttgtgttgttttgtatatgtttttgttttttttttttattagatttttagatttttttttttttttttttgagatggagttttgttttgttatttaggttggagtgtaatggtgtgattttggtttattataatttttgttttttgggtttaagtgatttttttgttttagttttttaagtagttgggattatagatgtgtgttataatgtttgtttaattttttgtatttttagtagagatggggttttattattttggttaggttggttttgaatttttgattttaagtgatttattttttttagttttttaaagtgttgggattataggtatgagtttgggtttagatatttagatttttattaatgatttttttggttttaatttttgggttttttttatttggtatagtgtttggtttttgttatgttagtttttattttttatgtatataaatggtgtttagtaaatatttatgtattgagtaaaatttaataattatttgttgaaattaaaaagtgaataaataagttatttagaaagatgtaaagtttataaatttggggtattttgtattttttttgagtgtaatgtttgtatattaggatgtgaggattatgttttttttttatgttttgagggttttatatttgttttattggatagttgttgatgttattggagaaggaagttggatgggtgtgtgtatgataatattaaggaatttagtttataatttattttgttttttatttgtgtatttttagagatgtgtatagtggttttttgtgaaagatagaattgtggtttttttggtgttatgtttttttagtgtgtaaataagggttgttgttttgatgatattgtttgtggggttttttggtgtttttattttaatattattgatgtttttttagaaggtatggtttttttatatgatgggttttgaagatttagaattagttagaaaagttatttaagattatagaggttttgattagtattattagttatgtttttatatagagttatggttgttagtggtggtgtaatggggtagtttgagttaggttgtatttaggtttaggaatagaaaggtagggttaagggatttgggaagaaatttgatttttttttggtttttttttatatttttaattaaaagtttgggaagagttattgttggtaatgttttttagtttgtttaggatagagggggaaggtatgatgaaatttgaagatattttatgtattttttttttttttttttttttgaaatggagttttgttttgttgtttttgagttggagtgtaatggtgtgattttggtttattgtaatttttgttttttgagtttaattttagttttttagtagttgagattataggtgtgtgttattatgtttagttaaattttttttgtatttttagtatagatggggttttattatgttggttagattggttttgaatttttgattttaggtgatttgtttgttttagttttttagagagttgggattataggtgtgagttattgtgtttggttgatagtttatgttttttaaagaatgtgtttatggatattttaaagtaaaaattttgtaattgtttaaatgtgaaagaaaatgtttatttttattaaagtattttttttttttttttttttatttttgtagaggagtgtgaattttagatatttttgtagggatttgtttgtattttgatgtggtgttgtttttagtatggtgattagttttagagtttggttgttatttttattggatattttagatatgtttttgtagttgtgttttggtttataatatagattgattgttttgattttgattatttaaaattggtttaaaaattaaaagagattgatattaatttgtgttgtttatttttttaaagaatatgaatgatttttttttttttgaaagtgaagtgtagtgttttattttgggtttttgtagaggttttgtattttttgggttttttgagttgggatataagtgggtagttgagtgtagaaagtagggatggtggggtgtatagtaggatagtggggtgtgtagtaggatagtggggtgtgtagtaggatggtggggtgtatagtaggatagtggggtgtgtagtaggatggtggggtgtgtagtgggatggtggggtgtgtagtaggatgtaagtttaagatgtatttttgtttaggtatgaaaatggatattgatttttttggtattttttaattatttattgtggatgttttagtgattaagtgatataagttagttttttgtttatttgtttttttaaatagaaattggtgtaggagatgaaatttgtagtagaatgtttgaaagtatgtgtaataaaaattgtagagggtggtatggattgatttttttaggaaaatttttttttaattttagatttgaatgaattagaaaatagaatagtagaggagggatatagaagttaaaatgttattttatttttattggtttttttgtagtttggtaaggattgggagagggtgtttttttaatttagttgtttttgttttggggattttagtttagtaagttttaagttaaatgtattttgggttttttttttttttatttgtttttttatttggtgtttttgtgttgggtatatgttgtatagttatattggagatgggattttttgggagttttggaaagtttttgttttttgtagttagatggttttagggaggaagagggaggtgtagaattgagtggggttagttttttttatattaattagtttggtaaattatttttaaatttttggttattatgtttagtagataaagaggtttgagaggttgggagatatttattaagaagaattattaggaatgggaagttttttgttttttgtatatagtagtatatatatgagttgtaataatatatatgttatgtatgtgttaggggggttatagatatttttttttattttttagatgtgtaaggaagttttagttttttttttttatttatggtatgtttgattttatattttttgtttgttaattataggtaaaaatgagttaattttatttagtttaattttttttaaaatttagtttgttataataatttgtatagtttttgttagttatagtttttgggaatgtattgtttagttttttattttgttttattttgttttgttttttttatttttgggtggggtgaaggagtttttggggtttgtttatgttttttggatttttgttggtttattgtggagtagaagttgggggtttttagagtttagttggtgtgtggtttgtttgttttttttatagttttttagtgttagaaaggtgggttttttatataatattttgtagttgattgttttttggttgtttattatttgtttttttttatttaatttgtattttatgaaggaagggggagaaagaatttatttttttagttttttttttagttagaagtggttgtgtaattttatgtggtttatgagatatagggggtatttttttgaaggtggggtaggttttttttttgatgaatgaagagtgttttttggttttttaggttagtttttgtagtttgtttttgggtgttgtggaaggtgggtgtgatgtggtgttgtaggtagttattatgtaataatgaggtaaggtttaagatttagagttttaataattttgagttattgatttgagttttttatttattttgagatattatgttaaataaatttaagtgtgtttgtgggttaaattatttttggtttggttttttgtggtattttagtatattattaaggtttatattttttatttattatagagtagtgagtttatggtttagttatgatggt
